(19) United States
(12) Patent Application Publication
(10) Pub. No.: US 2022/0233689 A1
(43) Pub. Date: Jul. 28, 2022

(54) METHODS OF TREATING TUMORS

(71) Applicants: Bristol-Myers Squibb Company, Princeton, NJ (US); Halozyme, Inc., San Diego, CA (US)

(72) Inventors: Masano Huang, Princeton, NJ (US); Thomas Arthur Haby, Lincroft, NJ (US); Mehrnaz KHOSSRAVI, West Windsor, NJ (US); Scott Aaron HART, Hillsborough, NJ (US); Rao Venkatramana MANTRI, Pennington, NJ (US); Heather Elizabeth VEZINA, Upper Holland, PA (US); Amit ROY, Woodbury, CT (US); Bindu Purnima MURTHY, Robbinsville, NJ (US); Urvi Ashish ARAS, Kendall Park, NJ (US); Kinjal SANGHAVI, Princeton, NJ (US); Xiaochen ZHAO, Pennington, NJ (US); Akintunde BELLO, Princeton Junction, NJ (US)

(73) Assignees: Bristol-Myers Squibb Company, Princeton, NJ (US); Halozyme, Inc., San Diego, CA (US)

(21) Appl. No.: 17/562,958

(22) Filed: Dec. 27, 2021

Related U.S. Application Data
(60) Provisional application No. 63/131,240, filed on Dec. 28, 2020.
(60) Provisional application No. 63/150,420, filed on Feb. 17, 2021.
(60) Provisional application No. 63/184,082, filed on May 4, 2021.

(51) Int. Cl. A61K 39/395; A61K 38/47; A61K 9/00; A61K 47/26; A61K 47/22; A61K 47/18

(52) U.S. Cl. CPC A61K 39/3955; A61K 38/47; A61K 9/0019; A61K 2039/545; A61K 47/22; A61K 47/183; A61K 47/26

(57) ABSTRACT

The disclosure provides pharmaceutical compositions comprising an anti-PD-1 antibody or an anti-PD-L1 antibody. In some aspects, the pharmaceutical compositions are formulated for subcutaneous delivery. In some aspects, the pharmaceutical compositions further comprise an endoglycosidase hydrolase enzyme. Other aspects of the present disclosure are directed to methods of subcutaneously delivering a pharmaceutical composition comprising an anti-PD-1 antibody or an anti-PD-L1 antibody.

### CROSS-REFERENCE TO RELATED APPLICATIONS

[0001] This application claims priority to and benefit of U.S. Provisional Application No. U.S. 63/131,240, filed on Dec. 28, 2020; U.S. 63/150,420, filed on Feb. 17, 2021; and U.S. 63/184,082, filed on May 4, 2021; each of which is hereby incorporated by reference herein in its entirety.

### REFERENCE TO SEQUENCE LISTING SUBMITTED ELECTRONICALLY VIA EFS-WEB

[0002] The content of the electronically submitted sequence listing (Name: 3338_2250004_Seqlisting_ST25.txt; Size: 1,011,280 bytes; and Date of Creation: Dec. 27, 2021) is herein incorporated by reference in its entirety.

### FIELD OF THE DISCLOSURE

[0003] The present disclosure provides a method for treating a subject afflicted with a tumor using a checkpoint inhibitor, e.g., an immunotherapy.

### BACKGROUND OF THE DISCLOSURE

[0004] Human cancers harbor numerous genetic and epigenetic alterations, generating neoantigens potentially recognizable by the immune system (Sjoblom et al., Science (2006) 314(5797):268-274). The adaptive immune system, comprised of T and B lymphocytes, has powerful anti-cancer potential, with a broad capacity and exquisite specificity to respond to diverse tumor antigens. Further, the immune system demonstrates considerable plasticity and a memory component. The successful harnessing of all these attributes of the adaptive immune system would make immunotherapy unique among all cancer treatment modalities.

[0005] Until recently, cancer immunotherapy had focused substantial effort on approaches that enhance anti-tumor immune responses by adoptive-transfer of activated effector cells, immunization against relevant antigens, or providing non-specific immune-stimulatory agents such as cytokines. In the past decade, however, intensive efforts to develop specific immune checkpoint pathway inhibitors have begun to provide new immunotherapeutic approaches for treating cancer, including the development of antibodies such as nivolumab and pembrolizumab (formerly lambrolizumab; USAN Council Statement, 2013) that bind specifically to the Programmed Death-1 (PD-1) receptor and block the inhibitory PD-1/PD-1 ligand pathway (Topalian et al., 2012a, b; Topalian et al., 2014; Hamid et al., 2013; Hamid and Carvajal, 2013; McDermott and Atkins, 2013).

[0006] Current methods of delivering anti-PD-1 and/or anti-PD-L1 antibodies use periodic intravenous administration, administered by a clinician, often in a clinic or hospital. The inconvenience and invasiveness of the treatment can negatively impact the patient's experience. Subcutaneous delivery, such as through the use of an auto injector or a wearable pump could greatly improve patient compliance. However, there remains a need in the art for formulations comprising anti-PD-1 or anti-PD-L1 antibodies that are suitable for subcutaneous delivery to patients.

### SUMMARY OF THE DISCLOSURE

[0007] Certain aspects of the present disclosure are directed to a method of treating a subject in need thereof, comprising subcutaneously administering to the subject a dose of a pharmaceutical composition comprising (i) an antibody that specifically binds PD-1 or PD-L1 and inhibits the interaction of PD-1 and PD-L1 (“an anti-PD-1 antibody” or “an anti-PD-L1 antibody”, respectively) and (ii) an endoglycosidase hydrolase enzyme; wherein the dose comprises one or more subcutaneous unit doses; and wherein the dose comprises at least about 300 mg to at least about 2400 mg of the anti-PD-1 antibody or the anti-PD-L1 antibody.

[0008] In some aspects, the dose comprises two or more subcutaneous unit doses, wherein the two or more subcutaneous unit doses are administered concurrently or subsequently. In some aspects, the two or more subcutaneous unit doses are administered subsequently, wherein each of the two or more subcutaneous unit doses is administered within an interval of about 5 minutes, about 10 minutes, about 15 minutes, about 20 minutes, about 30 minutes, about 45 minutes, about one hour, about two hours, about three hours, about four hours, about five hours, about six hours, about nine hours, about twelve hours, about eighteen hours, or about twenty-four hours between the subcutaneous unit doses. In some aspects, the dose is administered about every one, two, three, four, six, eight weeks.

[0009] In some aspects, the antibody comprises an anti-PD-1 antibody. In some aspects, the dose of the antibody is about 250 mg to about 600 mg administered about every week. In some aspects, the dose of the antibody is about 250 mg, about 260 mg, about 270 mg, about 280 mg, about 290 mg, about 300 mg, about 310 mg, about 320 mg, about 330 mg, about 340 mg, about 350 mg, about 360 mg, about 370 mg, about 380 mg, about 390 mg, about 400 mg, about 410 mg, about 420 mg, about 430 mg, about 440 mg, about 450 mg, about 460 mg, about 470 mg, about 480 mg, about 490 mg, about 500 mg, about 510 mg, about 520 mg, about 530 mg, about 540 mg, about 550 mg, about 560 mg, about 570 mg, about 580 mg, about 590 mg, or about 600 mg administered about every week. In some aspects, the dose of the antibody is about 300 mg administered about every week. In some aspects, the dose of the antibody comprises a single subcutaneous unit dose of about 300 mg. In some aspects, the dose of the antibody comprises a single subcutaneous unit dose of about 300 mg in a total administered volume of about 2 mL.

[0010] In some aspects, the dose of the antibody comprises (i) two subcutaneous unit doses, wherein each of the two subcutaneous unit doses comprises about 150 mg of the antibody; or (ii) three subcutaneous unit doses, wherein each of the three subcutaneous unit doses comprises about 100 mg of the antibody. In some aspects, (i) the two subcutaneous unit doses are administered to the subject at the same bodily location or (ii) at least two of the three subcutaneous unit doses are administered to the subject at the same bodily location.

[0011] In some aspects, the dose of the antibody is about 300 mg to about 900 mg administered about every two weeks. In some aspects, the dose of the antibody is about 300 mg, about 350 mg, about 400 mg, about 450 mg, about 500 mg, about 510 mg, about 520 mg, about 530 mg, about 540 mg, about 550 mg, about 560 mg, about 570 mg, about 580 mg, about 590 mg, about 600 mg, about 610 mg, about 620 mg, about 630 mg, about 640 mg, about 650 mg, about 660 mg, about 670 mg, about 680 mg, about 690 mg, about 700 mg, about 710 mg, about 720 mg, about 730 mg, about 740 mg, about 750 mg, about 760 mg, about 770 mg, about 780 mg, about 790 mg, about 800 mg, about 810 mg, about 820 mg, about 830 mg, about 840 mg, about 850 mg, about 860 mg, about 870 mg, about 880 mg, about 890 mg, or about 900 mg administered about every two weeks. In some aspects, the dose of the antibody is about 600 mg administered about every two weeks. In some aspects, the dose of the antibody comprises a single subcutaneous unit dose.

[0012] In some aspects, the dose of the antibody comprises two, three, or at least four subcutaneous unit doses. In some aspects, the dose of the antibody comprises two subcutaneous unit doses, wherein each of the two subcutaneous unit doses comprises about 300 mg of the antibody. In some aspects, at least one of the two subcutaneous unit doses comprises about 300 mg of the antibody in a total volume of greater than about 2 mL. In some aspects, at least two of the subcutaneous unit doses are administered to the subject the same bodily location.

[0013] In some aspects, the dose of the antibody is about 900 mg to about 1500 mg administered about every four weeks. In some aspects, the dose of the antibody is about 900, about 950, about 1000 mg, about 1010 mg, about 1020 mg, about 1030 mg, about 1040 mg, about 1050 mg, about 1060 mg, about 1070 mg, about 1080 mg, about 1090 mg, about 1100 mg, about 1110 mg, about 1120 mg, about 1130 mg, about 1140 mg, about 1150 mg, about 1160 mg, about 1170 mg, about 1180 mg, about 1190 mg, about 1200 mg, about 1210 mg, about 1220 mg, about 1230 mg, about 1240 mg, about 1250 mg, about 1260 mg, about 1270 mg, about 1280 mg, about 1290 mg, about 1300 mg, about 1310 mg, about 1320 mg, about 1330 mg, about 1340 mg, about 1350 mg, about 1360 mg, about 1370 mg, about 1380 mg, about 1390 mg, about 1400 mg, about 1410 mg, about 1420 mg, about 1430 mg, about 1440 mg, about 1450 mg, about 1460 mg, about 1470 mg, about 1480 mg, about 1490 mg, or about 1500 mg administered about every four weeks. In some aspects, the dose of the antibody is about 1200 mg administered about every four weeks. In some aspects, the dose of the antibody comprises a single subcutaneous unit dose.

[0014] In some aspects, the dose of the antibody comprises two, three, four, six, or at least eight subcutaneous unit doses. In some aspects, the dose of the antibody comprises four subcutaneous unit doses, wherein each of the four subcutaneous unit doses comprises about 300 mg of the antibody. In some aspects, at least one of the four subcutaneous unit doses comprises about 300 mg of the antibody in a total volume of greater than 2 mL. In some aspects, at least two of the subcutaneous unit doses are administered to the subject at the same bodily location. In some aspects, the two, three, four, six, or at least eight subcutaneous unit doses are administered on the same day.

[0015] In some aspects, the antibody comprises an anti-PD-L1 antibody. In some aspects, the dose of the antibody is about 900 mg to about 1800 mg of the antibody administered about every two weeks. In some aspects, the dose of the antibody is about 900, about 950, about 1000, about 1010 mg, about 1020 mg, about 1030 mg, about 1040 mg, about 1050 mg, about 1060 mg, about 1070 mg, about 1080 mg, about 1090 mg, about 1100 mg, about 1110 mg, about 1120 mg, about 1130 mg, about 1140 mg, about 1150 mg, about 1160 mg, about 1170 mg, about 1180 mg, about 1190 mg, about 1200 mg, about 1210 mg, about 1220 mg, about 1230 mg, about 1240 mg, about 1250 mg, about 1260 mg, about 1270 mg, about 1280 mg, about 1290 mg, about 1300 mg, about 1310 mg, about 1320 mg, about 1330 mg, about 1340 mg, about 1350 mg, about 1360 mg, about 1370 mg, about 1380 mg, about 1390 mg, about 1400 mg, about 1410 mg, about 1420 mg, about 1430 mg, about 1440 mg, about 1450 mg, about 1460 mg, about 1470 mg, about 1480 mg, about 1490 mg, about 1500 mg administered about every two weeks. In some aspects, the dose of the antibody is about 1200 mg about every two weeks. In some aspects, the dose comprises a single subcutaneous unit dose of about 1200 mg in a total administered volume of greater than about 5 mL.

[0016] In some aspects, the dose comprises two, three, four, six, or at least eight subcutaneous unit doses. In some aspects, the dose of the antibody comprises four subcutaneous unit doses, wherein each of the four subcutaneous unit doses comprises about 300 mg of the antibody. In some aspects, at least one of the four subcutaneous unit doses comprises about 300 mg of the antibody in a total volume of greater than about 2 mL. In some aspects, at least two of the subcutaneous unit doses are administered to the subject at the same bodily location. In some aspects, the two, three, four, six, or at least eight subcutaneous unit doses are administered on the same day.

[0017] In some aspects, the anti-PD-1 antibody or anti-PD-L1 antibody and the endoglycosidase hydrolase enzyme are administered together. In some aspects, the anti-PD-1 antibody or anti-PD-L1 antibody and the endoglycosidase hydrolase enzyme are administered concurrently. In some aspects, the anti-PD-1 antibody or anti-PD-L1 antibody and the endoglycosidase hydrolase enzyme are administered sequentially.

[0018] In some aspects, the pharmaceutical composition is administered at a dose of at least about 1,000 units to at least about 30,000 units of the endoglycosidase hydrolase enzyme. In some aspects, the pharmaceutical composition is administered at a dose of at least about 1000 units, at least about 1500 units, at least about 2000 units, at least about 2500 units, at least about 3000 units, at least about 3500 units, at least about 4000 units, at least about 4500 units, at least about 5000 units, at least about 6000 units, at least about 7000 units, at least about 8000 units, at least about 9000 units, at least about 10,000 units, at least about 11,000 units, at least about 12,000 units, at least about 13,000 units, at least about 14,000 units, at least about 15,000 units, at least about 16,000 units, at least about 17,000 units, at least about 18,000 units, at least about 19,000 units, at least about 20,000 units, at least about 21,000 units, at least about 22,000 units, at least about 23,000 units, at least about 24,000 units, at least about 25,000 units, at least about 26,000 units, at least about 27,000 units, at least about 28,000 units, at least about 29,000 units, or at least about 30,000 units of the endoglycosidase hydrolase enzyme. In some aspects, the pharmaceutical composition is administered at a dose of about 4000 units of the endoglycosidase hydrolase enzyme.

[0019] In some aspects, the pharmaceutical composition is administered at a dose of (i) about 300 mg of the antibody and (ii) about 4000 units of the endoglycosidase hydrolase enzyme, once about every week. In some aspects, the pharmaceutical composition is administered at a dose of (i) about 600 mg of the antibody and (ii) about 8000 units of the endoglycosidase hydrolase enzyme, once about every two weeks. In some aspects, the pharmaceutical composition is administered at a dose of (i) about 1200 mg of the antibody and (ii) about 20,000 units of the endoglycosidase hydrolase enzyme, once about every four weeks. In some aspects, the pharmaceutical composition is administered at a dose of (i) about 1200 mg of the antibody and (ii) about 8000 units of the endoglycosidase hydrolase enzyme, once about every two weeks. In some aspects, the pharmaceutical composition is administered at a dose of (i) about 1800 mg of the antibody and (ii) about 12,000 units of the endoglycosidase hydrolase enzyme, once about every three weeks.

[0020] In some aspects, the endoglycosidase hydrolase enzyme cleaves hyaluronic acid at a hexosaminidic β (1-4) or (1-3) linkage. In some aspects, the endoglycosidase hydrolase enzyme comprises a catalytic domain of hyaluronidase PH-20 (HuPH20), HYAL1, HYAL2, HYAL3, HYAL4, or HYALPS1. In some aspects, the endoglycosidase hydrolase enzyme comprises an amino acid sequence having at least about 70%, at least about 75%, at least about 80%, at least about 85%, at least about 90%, at least about 95%, at least about 96%, at least about 97%, at least about 98%, at least about 99%, or about 100% sequence identity to amino acids 36-490 of SEQ ID NO: 1. In some aspects, the endoglycosidase hydrolase enzyme comprises a hyaluronidase. In some aspects, the endoglycosidase hydrolase enzyme comprises a hyaluronidase selected from the group consisting of HuPH20, HYAL1, HYAL2, HYAL3, HYAL4, any variant, and any isoform thereof. In some aspects, the endoglycosidase hydrolase enzyme comprises rHuPH20 or a fragment thereof.

[0021] In some aspects, the endoglycosidase hydrolase enzyme comprises a modified hyaluronidase comprising one or more amino acid substitutions relative to a wild-type hyaluronidase selected from the group consisting of HuPH20, HYAL1, HYAL2, HYAL3, HYAL4, HYALPS1, or a fragment thereof. In some aspects, the endoglycosidase hydrolase enzyme comprises a modified hyaluronidase comprising one or more amino acid substitution in an alpha-helix region relative to a wild-type hyaluronidase selected from the group consisting of HuPH20, HYAL1, HYAL2, HYAL3, HYAL4, HYALPS1, or a fragment thereof. In some aspects, the endoglycosidase hydrolase enzyme comprises a modified hyaluronidase comprising one or more amino acid substitution in linker region relative to a wild-type hyaluronidase selected from the group consisting of HuPH20, HYAL1, HYAL2, HYAL3, HYAL4, HYALPS1, or a fragment thereof. In some aspects, the endoglycosidase hydrolase enzyme comprises a modified hyaluronidase, wherein one or more N-terminal and/or C-terminal amino acids are deleted relative to a wild-type hyaluronidase selected from the group consisting of HuPH20, HYAL1, HYAL2, HYAL3, HYAL4, HYALPS1, or a fragment thereof. In some aspects, the endoglycosidase hydrolase enzyme comprises a modified rHuPH20, wherein the modified rHuPH20 comprises: i. one or more amino acid substitution in an alpha-helix region, a linker region, or both an alpha-helix region and a linker region relative to wild-type rHuPH20; ii.deletion of one or more N-terminal amino acid, one or more C-terminal amino acid, or one or more N-terminal amino acid and one or more C-terminal amino acid relative to wild-type rHuPH20; or iii. both (i) and (ii).

[0022] In some aspects, the anti-PD-1 antibody comprises an antibody selected from the group consisting of nivolumab, pembrolizumab, PDR001, MEDI-0680, cemiplimab, toripalimab, tislelizumab, INCSHR1210, TSR-042, GLS-010, AM-0001, STI-1110, AGEN2034, MGA012, BCD-100, IBI308, and any combination thereof. In some aspects, the anti-PD-1 antibody cross-competes with nivolumab for binding to human PD-1. In some aspects, the anti-PD-1 antibody comprises nivolumab. In some aspects, the anti-PD-1 antibody comprises pembrolizumab.

[0023] In some aspects, the anti-PD-L1 antibody comprises an antibody selected from the group consisting of BMS-936559, atezolizumab, durvalumab, avelumab, STI-1014, CX-072, KN035, LY3300054, BGB-A333, CK-301, and any combination thereof.

[0024] In some aspects, the subject is afflicted with a cancer. In some aspects, the cancer is selected from the group consisting of squamous cell carcinoma, small-cell lung cancer (SCLC), non-small cell lung cancer (NSCLC), squamous NSCLC, nonsquamous NSCLC, glioma, gastrointestinal cancer, renal cancer, clear cell carcinoma, ovarian cancer, liver cancer, colorectal cancer, endometrial cancer, kidney cancer, renal cell carcinoma (RCC), prostate cancer, hormone refractory prostate adenocarcinoma, thyroid cancer, neuroblastoma, pancreatic cancer, glioblastoma, glioblastoma multiforme, cervical cancer, stomach cancer, bladder cancer, hepatoma, breast cancer, colon carcinoma, head and neck cancer, gastric cancer, germ cell tumor, pediatric sarcoma, sinonasal natural killer, melanoma, bone cancer, skin cancer, uterine cancer, cancer of the anal region, testicular cancer, carcinoma of the fallopian tubes, carcinoma of the endometrium, carcinoma of the cervix, carcinoma of the vagina, carcinoma of the vulva, cancer of the esophagus, cancer of the small intestine, cancer of the endocrine system, cancer of the parathyroid gland, cancer of the adrenal gland, sarcoma of soft tissue, cancer of the urethra, cancer of the penis, rectal cancer, solid tumors of childhood, cancer of the ureter, carcinoma of the renal pelvis, neoplasm of the central nervous system (CNS), primary CNS lymphoma, tumor angiogenesis, spinal axis tumor, brain cancer, brain stem glioma, pituitary adenoma, Kaposi's sarcoma, epidermoid cancer, squamous cell cancer, environmentally-induced cancers including those induced by asbestos, virus-related cancers or cancers of viral origin (e.g., human papilloma virus (HPV-related or -originating tumors)), and any combination thereof.

[0025] In some aspects, the pharmaceutical composition is administered using an auto-injector. In some aspects, the pharmaceutical composition is administered using a wearable pump.

[0026] In some aspects, the pharmaceutical composition is administered to the subject by subcutaneous infusion for less than about 10 minutes. In some aspects, the pharmaceutical composition is administered to the subject by subcutaneous infusion for less than about 5 minutes.

[0027] In some aspects, the pharmaceutical compositions further comprises at least two antioxidants. In some aspects, the at least two antioxidants are selected from methionine, tryptophan, histidine, cysteine, ascorbic acid, glycine, DTPA, and EDTA. In some aspects, the at least two antioxidants comprise (i) methionine and EDTA or (ii) methionine and DTPA. In some aspects, the at least two antioxidants comprise at least about 1 to about 20 mM methionine. In some aspects, the at least two antioxidants comprise at least about 1 mM, at least about 1.5 mM, at least about 2 mM, at least about 2.5 mM, at least about 3 mM, at least about 3.5 mM, at least about 4 mM, at least about 4.5 mM, at least about 5 mM, at least about 5.5 mM, at least about 6 mM, at least about 6.5 mM, at least about 7 mM, at least about 7.5 mM, at least about 8 mM, at least about 8.5 mM, at least about 9 mM, at least about 9.5 mM, at least about 10 mM, at least about 11 mM, at least about 12 mM, at least about 13 mM, at least about 14 mM, at least about 15 mM, at least about 16 mM, at least about 17 mM, at least about 18 mM, at least about 19 mM, or at least about 20 mM methionine. In some aspects, the at least two antioxidants comprise about 5 mM methionine.

[0028] In some aspects, the at least two antioxidants comprise at least about 10 μM to about 200 μM DTPA. In some aspects, the at least two antioxidants comprise at least about 10 μM, at least about 15 μM, at least about 20 μM, at least about 25 μM, at least about 30 μM, at least about 35 μM, at least about 40 μM, at least about 45 μM, at least about 50 μM, at least about 55 μM, at least about 60 μM, at least about 65 μM, at least about 70 μM, at least about 75 μM, at least about 80 μM, at least about 85 μM, at least about 90 μM, at least about 95 μM, at least about 100 μM, at least about 110 μM, at least about 120 μM, at least about 130 μM, at least about 140 μM, at least about 150 μM, at least about 160 μM, at least about 170 μM, at least about 180 μM, at least about 190 μM, or at least about 200 μM DTPA. In some aspects, the at least two antioxidants comprise about 50 μM DTPA.

[0029] In some aspects, the pharmaceutical compositions further comprises a tonicity modifier and/or stabilizer. In some aspects, the tonicity modifier and/or stabilizer comprises a sugar, an amino acid, a polyol, a salt, or a combination thereof. In some aspects, the tonicity modifier and/or stabilizer is selected from the group consisting of sucrose, sorbitol, trehalose, mannitol, glycerol, glycine, leucine, isoleucine, sodium chloride, proline, arginine, histidine, and any combination thereof. In some aspects, the tonicity modifier comprises sucrose. In some aspects, the pharmaceutical composition comprises at least about 10 mM to at least about 500 mM sucrose. In some aspects, the pharmaceutical composition comprises at least about 10 mM, at least about 20 mM, at least about 30 mM, at least about 40 mM, at least about 50 mM, at least about 60 mM, at least about 70 mM, at least about 80 mM, at least about 90 mM, at least about 100 mM, at least about 110 mM, at least about 120 mM, at least about 130 mM, at least about 140 mM, at least about 150 mM, at least about 160 mM, at least about 170 mM, at least about 180 mM, at least about 190 mM, at least about 200 mM, at least about 210 mM, at least about 220 mM, at least about 230 mM, at least about 240 mM, at least about 250 mM, at least about 260 mM, at least about 270 mM, at least about 280 mM, at least about 290 mM, at least about 300 mM, at least about 310 mM, at least about 320 mM, at least about 330 mM, at least about 340 mM, at least about 350 mM, at least about 360 mM, at least about 370 mM, at least about 380 mM, at least about 390 mM, at least about 400 mM, at least about 410 mM, at least about 420 mM, at least about 430 mM, at least about 440 mM, at least about 450 mM, at least about 460 mM, at least about 470 mM, at least about 480 mM, at least about 490 mM, or at least about 500 mM sucrose. In some aspects, the pharmaceutical composition comprises about 250 mM sucrose.

[0030] In some aspects, the pharmaceutical composition further comprises a buffering agent. In some aspects, the buffering agent is selected from histidine, succinate, tromethamine, sodium phosphate, sodium acetate, and sodium citrate. In some aspects, the buffering agent comprises histidine. In some aspects, the pharmaceutical composition comprises at least about 5 mM to at least about 100 mM histidine. In some aspects, the pharmaceutical composition comprises at least about 5 mM, at least about 10 mM, at least about 15 mM, at least about 20 mM, at least about 25 mM, at least about 30 mM, at least about 35 mM, at least about 40 mM, at least about 45 mM, at least about 50 mM, at least about 60 mM, at least about 70 mM, at least about 80 mM, at least about 90 mM, or at least about 100 mM histidine. In some aspects, the pharmaceutical composition comprises about 20 mM histidine.

[0031] In some aspects, the pharmaceutical composition further comprises a surfactant. In some aspects, the surfactant is selected from the group consisting of polysorbate 20, polysorbate 80, and poloxamer 188. In some aspects, the surfactant comprises polysorbate 80. In some aspects, the pharmaceutical composition comprises at least about 0.01% w/v to at least about 0.1% w/v polysorbate 80. In some aspects, the pharmaceutical composition comprises at least about 0.01% w/v, at least about 0.02% w/v, at least about 0.03% w/v, at least about 0.04% w/v, at least about 0.05% w/v, at least about 0.06% w/v, at least about 0.07% w/v, at least about 0.08% w/v, at least about 0.09% w/v, or at least about 0.1% w/v polysorbate 80. In some aspects, the pharmaceutical composition comprises about 0.05% w/v polysorbate 80.

[0032] In some aspects, the pharmaceutical composition comprises: (a) about 120 mg/mL of the anti-PD-1 antibody; (b) about 20 mM L-histidine; (c) about 250 mM sucrose; (d) about 0.05% w/v polysorbate 80; (e) about 50 μM pentetic acid; (f) about 5 mM methionine; and (g) about 0.0182 mg/mL rHuPH20.

[0033] In some aspects, the pharmaceutical composition comprises: (a) about 120 mg/mL of the anti-PD-1 antibody; (b) about 20 mM L-histidine; (c) about 250 mM sucrose; (d) about 0.05% w/v polysorbate 80; (e) about 50 μM pentetic acid; (f) about 5 mM methionine; and (g) about 2000 U/mL rHuPH20.

[0034] In some aspects, the pharmaceutical composition comprises: (a) about 150 mg/mL of the anti-PD-1 antibody; (b) about 20 mM L-histidine; (c) about 250 mM sucrose; (d) about 0.05% w/v polysorbate 80; (e) about 50 μM pentetic acid; (f) about 5 mM methionine; and (g) about 0.0182 mg/mL rHuPH20.

[0035] In some aspects, the pharmaceutical composition comprises: (a) about 150 mg/mL of the anti-PD-1 antibody; (b) about 20 mM L-histidine; (c) about 250 mM sucrose; (d) about 0.05% w/v polysorbate 80; (e) about 50 μM pentetic acid; (f) about 5 mM methionine; and (g) about 2000 U/mL rHuPH20.

[0036] In some aspects, the pharmaceutical composition comprises a pH of about 5.2 to about 6.8. In some aspects, the pharmaceutical composition comprises a pH of about 5.2, about 5.3, about 5.4, about 5.5, about 5.6, about 5.7, about 5.8, about 5.9, about 6.0, about 6.1, about 6.2, about 6.3, about 6.4, about 6.5, about 6.6, about 6.7, or about 6.8. In some aspects, the pharmaceutical composition comprises a pH of about 6.0.

[0037] Certain aspects of the present disclosure are directed to a pharmaceutical composition for use in any method disclosed herein. Certain aspects of the present disclosure are directed to a pharmaceutical composition comprising (i) an antibody that specifically binds PD-1 (“anti-PD-1 antibody”), (ii) an endoglycosidase hydrolase enzyme, and (iii) at least two antioxidants.

[0038] In some aspects, the pharmaceutical composition comprises at least about 50 U/mL to at least about 5000 U/mL of the endoglycosidase hydrolase enzyme. In some aspects, the pharmaceutical composition comprises at least about 50 U/mL, at least about 100 U/mL, at least about 150 U/mL, at least about 200 U/mL, at least about 250 U/mL, at least about 300 U/mL, at least about 350 U/mL, at least about 400 U/mL, at least about 450 U/mL, at least about 500 U/mL, at least about 750 U/mL, at least about 1000 U/mL, at least about 1500 U/mL, at least about 2000 U/mL, at least about 2500 U/mL, at least about 3000 U/mL, at least about 3500 U/mL, at least about 4000 U/mL, at least about 4500 U/mL, at least about 5000 U/mL, at least about 5500 U/mL, at least about 6000 U/mL, at least about 6500 U/mL, at least about 7000 U/mL, at least about 7500 U/mL, at least about 8000 U/mL, at least about 8500 U/mL, at least about 9000 U/mL, at least about 9500 U/mL, at least about 10,000 U/mL of the endoglycosidase hydrolase enzyme. In some aspects, the pharmaceutical composition comprises at least about 500 U/mL of the endoglycosidase hydrolase enzyme. In some aspects, the pharmaceutical composition comprises at least about 1000 U/mL of the endoglycosidase hydrolase enzyme. In some aspects, the pharmaceutical composition comprises at least about 2000 U/mL of the endoglycosidase hydrolase enzyme.

[0039] In some aspects, the endoglycosidase hydrolase enzyme cleaves hyaluronic acid at a hexosaminidic β (1-4) or (1-3) linkage. In some aspects, the endoglycosidase hydrolase enzyme comprises a catalytic domain of hyaluronidase PH-20 (HuPH20), HYAL1, HYAL2, HYAL3, HYAL4, or HYALPS1. In some aspects, the endoglycosidase hydrolase enzyme comprises an amino acid sequence having at least about 70%, at least about 75%, at least about 80%, at least about 85%, at least about 90%, at least about 95%, at least about 96%, at least about 97%, at least about 98%, at least about 99%, or about 100% sequence identity to amino acids 36-490 of SEQ ID NO: 1. In some aspects, the endoglycosidase hydrolase enzyme comprises a hyaluronidase. In some aspects, the endoglycosidase hydrolase enzyme comprises a hyaluronidase selected from the group consisting of HuPH20, HYAL1, HYAL2, HYAL3, HYAL4, any variant, and any isoform thereof. In some aspects, the endoglycosidase hydrolase enzyme comprises rHuPH20 or a fragment thereof.

[0040] In some aspects, the endoglycosidase hydrolase enzyme comprises a modified hyaluronidase comprising one or more amino acid substitutions relative to a wild-type hyaluronidase selected from the group consisting of HuPH20, HYAL1, HYAL2, HYAL3, HYAL4, HYALPS1, or a fragment thereof. In some aspects, the endoglycosidase hydrolase enzyme comprises a modified hyaluronidase comprising one or more amino acid substitution in an alpha-helix region relative to a wild-type hyaluronidase selected from the group consisting of HuPH20, HYAL1, HYAL2, HYAL3, HYAL4, HYALPS1, or a fragment thereof. In some aspects, the endoglycosidase hydrolase enzyme comprises a modified hyaluronidase comprising one or more amino acid substitution in linker region relative to a wild-type hyaluronidase selected from the group consisting of HuPH20, HYAL1, HYAL2, HYAL3, HYAL4, HYALPS1, or a fragment thereof. In some aspects, the endoglycosidase hydrolase enzyme comprises a modified hyaluronidase, wherein one or more N-terminal and/or C-terminal amino acids are deleted relative to a wild-type hyaluronidase selected from the group consisting of HuPH20, HYAL1, HYAL2, HYAL3, HYAL4, HYALPS1, or a fragment thereof. In some aspects, the endoglycosidase hydrolase enzyme comprises a modified rHuPH20, wherein the modified rHuPH20 comprises: (i) one or more amino acid substitution in an alpha-helix region, a linker region, or both an alpha-helix region and a linker region relative to wild-type rHuPH20; (ii) deletion of one or more N-terminal amino acid, one or more C-terminal amino acid, or one or more N-terminal amino acid and one or more C-terminal amino acid relative to wild-type rHuPH20; or (iii) both (i) and (ii).

[0041] In some aspects, the at least two antioxidants are selected from methionine, tryptophan, histidine, cysteine, ascorbic acid, glycine, DTPA, and EDTA. In some aspects, the at least two antioxidants comprise (i) methionine and EDTA or (ii) methionine and DTPA. In some aspects, the at least two antioxidants comprise at least about 1 to about 20 mM methionine. In some aspects, the at least two antioxidants comprise at least about 1 mM, at least about 1.5 mM, at least about 2 mM, at least about 2.5 mM, at least about 3 mM, at least about 3.5 mM, at least about 4 mM, at least about 4.5 mM, at least about 5 mM, at least about 5.5 mM, at least about 6 mM, at least about 6.5 mM, at least about 7 mM, at least about 7.5 mM, at least about 8 mM, at least about 8.5 mM, at least about 9 mM, at least about 9.5 mM, at least about 10 mM, at least about 11 mM, at least about 12 mM, at least about 13 mM, at least about 14 mM, at least about 15 mM, at least about 16 mM, at least about 17 mM, at least about 18 mM, at least about 19 mM, or at least about 20 mM methionine. In some aspects, the at least two antioxidants comprise about 5 mM methionine.

[0042] In some aspects, the at least two antioxidants comprise at least about 10 μM to about 200 μM DTPA. In some aspects, the at least two antioxidants comprise at least about 10 μM, at least about 15 μM, at least about 20 μM, at least about 25 μM, at least about 30 μM, at least about 35 μM, at least about 40 μM, at least about 45 μM, at least about 50 μM, at least about 55 μM, at least about 60 μM, at least about 65 μM, at least about 70 μM, at least about 75 μM, at least about 80 μM, at least about 85 μM, at least about 90 μM, at least about 95 μM, at least about 100 μM, at least about 110 μM, at least about 120 μM, at least about 130 μM, at least about 140 μM, at least about 150 μM, at least about 160 μM, at least about 170 μM, at least about 180 μM, at least about 190 μM, or at least about 200 μM DTPA. In some aspects, the at least two antioxidants comprise about 50 μM DTPA.

[0043] In some aspects, the pharmaceutical composition comprises at least about 20 mg/mL to at least about 200 mg/mL of the anti-PD-1 antibody. In some aspects, the pharmaceutical composition comprises at least about 135 mg/mL to at least about 180 mg/mL of the anti-PD-1 antibody. In some aspects, the pharmaceutical composition comprises at least about 108 mg/mL to at least about 132 mg/mL of the anti-PD-1 antibody. In some aspects, the pharmaceutical composition comprises at least about 20 mg/mL, at least about 30 mg/mL, at least about 40 mg/mL, at least about 50 mg/mL, at least about 60 mg/mL, at least about 70 mg/mL, at least about 80 mg/mL, at least about 90 mg/mL, at least about 100 mg/mL, at least about 110 mg/mL, at least about 120 mg/mL, at least about 130 mg/mL, at least about 140 mg/mL, at least about 150 mg/mL, at least about 160 mg/mL, at least about 170 mg/mL, at least about 180 mg/mL, at least about 190 mg/mL, or at least about 200 mg/mL of the anti-PD-1 antibody. In some aspects, the pharmaceutical composition comprises about 120 mg/mL of the anti-PD-1 antibody. In some aspects, the pharmaceutical composition comprises about 150 mg/mL of the anti-PD-1 antibody.

[0044] In some aspects, the pharmaceutical composition further comprises a tonicity modifier and/or stabilizer. In some aspects, the tonicity modifier and/or stabilizer comprises a sugar, an amino acid, a polyol, a salt, or a combination thereof. In some aspects, the tonicity modifier and/or stabilizer is selected from the group consisting of sucrose, sorbitol, trehalose, mannitol, glycerol, glycine, leucine, isoleucine, sodium chloride, proline, arginine, histidine, and any combination thereof. In some aspects, the tonicity modifier comprises sucrose. In some aspects, the pharmaceutical composition comprises at least about 10 mM to at least about 500 mM sucrose. In some aspects, the pharmaceutical composition comprises at least about 10 mM, at least about 20 mM, at least about 30 mM, at least about 40 mM, at least about 50 mM, at least about 60 mM, at least about 70 mM, at least about 80 mM, at least about 90 mM, at least about 100 mM, at least about 110 mM, at least about 120 mM, at least about 130 mM, at least about 140 mM, at least about 150 mM, at least about 160 mM, at least about 170 mM, at least about 180 mM, at least about 190 mM, at least about 200 mM, at least about 210 mM, at least about 220 mM, at least about 230 mM, at least about 240 mM, at least about 250 mM, at least about 260 mM, at least about 270 mM, at least about 280 mM, at least about 290 mM, at least about 300 mM, at least about 310 mM, at least about 320 mM, at least about 330 mM, at least about 340 mM, at least about 350 mM, at least about 360 mM, at least about 370 mM, at least about 380 mM, at least about 390 mM, at least about 400 mM, at least about 410 mM, at least about 420 mM, at least about 430 mM, at least about 440 mM, at least about 450 mM, at least about 460 mM, at least about 470 mM, at least about 480 mM, at least about 490 mM, or at least about 500 mM sucrose. In some aspects, the pharmaceutical composition comprises about 250 mM sucrose.

[0045] In some aspects, the pharmaceutical composition further comprises a buffering agent. In some aspects, the buffering agent is selected from histidine, succinate, tromethamine, sodium phosphate, sodium acetate, and sodium citrate. In some aspects, the buffering agent comprises histidine. In some aspects, the pharmaceutical composition comprises at least about 5 mM to at least about 100 mM histidine. In some aspects, the pharmaceutical composition comprises at least about 5 mM, at least about 10 mM, at least about 15 mM, at least about 20 mM, at least about 25 mM, at least about 30 mM, at least about 35 mM, at least about 40 mM, at least about 45 mM, at least about 50 mM, at least about 60 mM, at least about 70 mM, at least about 80 mM, at least about 90 mM, or at least about 100 mM histidine. In some aspects, the pharmaceutical composition comprises about 20 mM histidine.

[0046] In some aspects, the pharmaceutical composition further comprises a surfactant. In some aspects, the surfactant is selected from the group consisting of polysorbate 20, polysorbate 80, and poloxamer 188. In some aspects, the surfactant comprises polysorbate 80. In some aspects, the pharmaceutical composition comprises at least about 0.01% w/v to at least about 0.1% w/v polysorbate 80. In some aspects, the pharmaceutical composition comprises at least about 0.01% w/v, at least about 0.02% w/v, at least about 0.03% w/v, at least about 0.04% w/v, at least about 0.05% w/v, at least about 0.06% w/v, at least about 0.07% w/v, at least about 0.08% w/v, at least about 0.09% w/v, or at least about 0.1% w/v polysorbate 80. In some aspects, the pharmaceutical composition comprises about 0.05% w/v polysorbate 80.

[0047] In some aspects, the pharmaceutical composition comprises: (a) about 150 mg/mL of the anti-PD-1 antibody; (b) about 20 mM histidine; (c) about 250 mM sucrose; (d) about 0.05% w/v polysorbate 80; (e) about 50 μM pentetic acid; (f) about 5 mM methionine; and (g) about 2000 U/mL rHuPH20.

[0048] In some aspects, the pharmaceutical composition comprises: (a) about 120 mg/mL of the anti-PD-1 antibody; (b) about 20 mM histidine; (c) about 250 mM sucrose; (d) about 0.05% w/v polysorbate 80; (e) about 50 μM pentetic acid; (f) about 5 mM methionine; and (g) about 2000 U/mL rHuPH20.

[0049] In some aspects, the pharmaceutical composition comprises a pH of about 5.2 to about 6.8. In some aspects, the pharmaceutical composition comprises a pH of about 5.2, about 5.3, about 5.4, about 5.5, about 5.6, about 5.7, about 5.8, about 5.9, about 6.0, about 6.1, about 6.2, about 6.3, about 6.4, about 6.5, about 6.6, about 6.7, or about 6.8. In some aspects, the pharmaceutical composition comprises a pH of about 6.0.

[0050] Certain aspects of the present disclosure are directed to a unit dose comprising any pharmaceutical composition disclosed herein.

[0051] Certain aspects of the present disclosure are directed to a unit dose comprising: (a) about 120 mg/mL of the anti-PD-1 antibody; (b) about 20 mM L-histidine; (c) about 250 mM sucrose; (d) about 0.05% w/v polysorbate 80; (e) about 50 μM pentetic acid; (f) about 5 mM methionine; and (g) about 2000 U/mL rHuPH20.

[0052] Certain aspects of the present disclosure are directed to a unit dose comprising: (a) about 150 mg/mL of the anti-PD-1 antibody; (b) about 20 mM L-histidine; (c) about 250 mM sucrose; (d) about 0.05% w/v polysorbate 80; (e) about 50 μM pentetic acid; (f) about 5 mM methionine; and (g) about 2000 U/mL rHuPH20.

[0053] In some aspects, the pharmaceutical composition further comprises a second therapeutic agent. In some aspects, the second therapeutic agent is an antibody. In some aspects, the second therapeutic agent is a checkpoint inhibitor. In some aspects, the checkpoint inhibitor is an anti-CTLA-4 antibody, an anti-LAG-3 antibody, an anti-TIM3 antibody, an anti-TIGIT antibody, an anti-TIM3 antibody, an anti-NKG2a antibody, an anti-OX40 antibody, an anti-ICOS antibody, an anti-MICA antibody, an anti-CD137 antibody, an anti-KIR antibody, an anti-TGFβ antibody, an anti-IL-10 antibody, an anti-IL-8 antibody, an anti-B7-H4 antibody, an anti-Fas ligand antibody, an anti-CXCR4 antibody, an anti-mesothelin antibody, an anti-CD27 antibody, an anti-GITR, or any combination thereof. In some aspects, the pharmaceutical composition further comprises a third therapeutica agent. In some aspects, the second therapeutic agent, the third therapeutic agent, or both comprises an IL-2 (e.g., bempegaldesleukin) or an IL12-Fc (e.g., BMS-986415).

[0054] Certain aspects of the present disclosure are directed to a vial comprising any pharmaceutical composition disclosed herein or any unit dose disclosed herein.

[0055] In some aspects, the vial is an autoinjector. Certain aspects of the present disclosure are directed to an autoinjector comprising any pharmaceutical composition disclosed herein or any unit dose disclosed herein.

[0056] In some aspects, the vial is a wearable pump. Certain aspects of the present disclosure are directed to a wearable pump comprising any pharmaceutical composition disclosed herein or any unit dose disclosed herein.

### BRIEF DESCRIPTION OF THE DRAWINGS

[0057] FIG. 1 presents a graphical representation of data related to the osmolality and viscosity of nivolumab subcutaneous (SC) injection formulations as a function of sucrose concentration in the formulation in accordance with Example 1. The X-axis represents sucrose concentration in mM, and the Y-axis represents formulation osmolality in mOsm/kg. The solid circles and solid line represent osmolality values, and the solid X and dashed line represent viscosity values.

[0058] FIG. 2 presents a graphical representation of data related to the effect of 75 mM added arginine on Nivolumab subcutaneous (SC) injection formulation viscosity in accordance with Example 1. The X-axis represents protein concentration in mg/mL, and the Y-axis represents viscosity in cP at 20° C. The solid boxes represent samples comprising added arginine, and the solid diamonds represent samples without added arginine.

[0059] FIG. 3 is a schematic of a study directed to assessing the safety and efficacy of various doses of a subcutaneously administered anti-PD-1 antibody (e.g., nivolumab) alone or in combination with a hyaluronidase (e.g., rHuPH20).

[0060] FIG. 4 is a line graph illustration of a predictive check of a combined SC/IV PPK model for administration of nivolumab. Individual dots represent observed data. The lines represent the 5th, 50th, and 95th percentiles of observed data, respectively. Shaded areas represent the simulation-based 90% CIs for the 5^{th} (lowest trend line), 50^{th} (middle trend line), and 95^{th} (highest trend line) percentiles of the predicted data. Conc=concentration; Nivo=nivolumab; Pred-Corr=prediction corrected.

[0061] FIGS. 5A-5C are box plots illustrating the predicted geometric mean ratios (SC/IV) for Cavgd28 (FIG. 5A), Cmind28 (FIG. 5B), and Cmax1 (FIG. 5C) exposures, by tumor type. CRC=colorectal cancer; HCC=hepatocellular cancer; Mel=melanoma; NSCLC=non-small cell lung cancer; and RCC=renal cell carcinoma.

[0062] FIG. 6 is a schematic of a study directed to assessing the safety and efficacy of a 1200 mg nivolumab in combination with a hyaluronidase (e.g., rHuPH20) administered subcutaneously once every 4 weeks, as compared to 3 mg/kg nivolumab administered IV once every 2 weeks.

[0063] FIG. 7 is a box plot illustrating the distribution of nivolumab Cmind28 across dose and body weight at 3 mg/kg nivolumab IV once every 2 weeks, 10 mg/kg nivolumab IV once every 2 weeks, and 1200 mg nivolumab subcutaneously once every 4 weeks.

[0064] FIGS. 8A-8C are box plots illustrating observed distribution of C_{avg} (FIG. 8A), Cₜₐᵤ (FIG. 8B), and Cₘₐₓ (FIG. 8C) by weight observed following subcutaneous delivery of nivolumab at 720 mg, 960 mg, or 1200 mg with rHuPH20. The dashed line shows the geometric mean C_{avg} (FIG. 8A) and Cₜₐᵤ (FIG. 8B) for nivolumab 3 mg/kg IV Q2W (historical) and the geometric mean Cₘₐₓ (FIG. 8C) for nivolumab 10 mg/kg IV Q2W (historical).

[0065] FIGS. 9A-9B show tumor infiltrating lymphocyte CD8 expression (FIG. 9A) and PD-L1 tumor expression (FIG. 9B) 14 days after a first subcutaneous dose of nivolumab and rHuPH20 (Parts A, B, and D) for subjects afflicted with non-small cell lung cancer (NSCLC), renal cell carcinoma (RCC), melanoma (Mel), hepatocellular carcinoma (HCC), and microsatellite instability-high/mismatch repair deficient colorectal cancer (MSI-H/dMMR CRC).

[0066] FIG. 10 is a graphical representation of impact of headspace nitrogen and air on % HMW species for Nivo by SEC after combination of metal, peroxide and light stress with a thermal stress of 30° C., in study 1. RT/Light is continuous light stress, other light stress conditions are for a 3 day duration. Formulation 1 (Air) and 6 (Nitrogen) have: 50 μm DTPA 5 mM Met; Formulation 2 (Air) and 7 (Nitrogen) have: 0 μM DTPA, 0 mM Met. All formulations also contain 120 mg/mL Nivo, 20 mM Histidine, 250 mM Sucrose, 0.05% w/v PS80 at pH 6.0 with 2,000 U/mL rHuPH20.

[0067] FIG. 11 is a graphical representation of the impact for various stress conditions on % HMW species for Nivo by SEC after combination of metal, peroxide and light stress with a thermal stress of 30° C., in study 1. RT/Light is continuous light stress, other light stress conditions are for a 3 day duration. Formulation 1: 50 μm DTPA 5 mM Met; Formulation 2: 0 μM DTPA, 0 mM Met; Formulation 3: 0 μM DTPA, 5 mM Met; Formulation 4: 50 μM DTPA, 0 mM Met; and Formulation 5:100 μM EDTA, 5 mM Met. All formulations also contain 120 mg/mL Nivo, 20 mM Histidine, 250 mM Sucrose, 0.05% w/v PS80 at pH 6.0 with 2,000 U/mL rHuPH20.

[0068] FIG. 12 is a graphical representation of HMW formation under Metal—0.5 ppm each of iron, chromium, and copper+light (3 days at 1000 lux at room temperature+1 mM peroxide+30° C. thermal stress), in study 1. Note: Formulation 1 (air) and 6 (nitrogen) overlay on top of each other completely and has the least HMW formation with the same formulation composition. Formulation 1 (air) and 6 (nitrogen): 50 μm DTPA 5 mM Met; Formulation 2 (air) and 7 (nitrogen): 0 μM DTPA, 0 mM Met; Formulation 3: 0 μM DTPA, 5 mM Met; Formulation 4: 50 μM DTPA, 0 mM Met; and Formulation 5:100 μM EDTA, 5 mM Met. All formulations also contain 120 mg/mL Nivo, 20 mM Histidine, 250 mM Sucrose, 0.05% w/v PS80 at pH 6.0 with 2,000 U/mL rHuPH20.

[0069] FIG. 13 is a graphical representation of the % HMW in Study 1 after 3 months under various combinations of metal (0.5 ppm each of iron, chromium, and copper), light (3 days at 1000 lux at room temperature), and peroxide (1 mM peroxide) with 30° C. thermal stress by formulation composition with/without 5 mM Met and 50 μM DTPA and 100 μm EDTA. All formulations also contain 120 mg/mL Nivo, 20 mM Histidine, 250 mM Sucrose, 0.05% w/v PS80 at pH 6.0 with 2,000 U/mL rHuPH20.

[0070] FIG. 14 is a graphical representation of % HMW in Study 1 after 3 months under various combinations of metal (0.5 ppm each of iron, chromium, and copper), light (3 days at 1000 lux at room temperature), and peroxide (1 mM peroxide) with 30° C. thermal stress included in the main effects statistical model. The graph is divided by formulation composition with/without 5 mM Met and 50 μM DTPA. All formulations also contain 120 mg/mL Nivo, 20 mM Histidine, 250 mM Sucrose, 0.05% w/v PS80 at pH 6.0 with 2,000 U/mL rHuPH20.

[0071] FIG. 15 is a graphical representation of rHuPH20 enzyme activity in Study 1 upon storage at 3 days RT/Dark followed by 30° C./Dark [Control—Left], RT/RL for 3 days followed by 30° C./Dark with Metal Spike and Peroxide Spike [MPL—Middle], and Room temperature/room light [RT/Light—Right]. Formulation 1 (air) and 6 (nitrogen): 50 μm DTPA 5 mM Met; Formulation 2 (air) and 7 (nitrogen): 0 μM DTPA, 0 mM Met; Formulation 3: 0 μM DTPA, 5 mM Met; Formulation 4: 50 μM DTPA, 0 mM Met. All formulations also contain 120 mg/mL Nivo, 20 mM Histidine, 250 mM Sucrose, 0.05% w/v PS80 at pH 6.0 with 2,000 U/mL rHuPH20.

[0072] FIGS. 16A-16F are graphical representations of the distribution of the formulations of Study 2. Formulations ranged at max and min of the excipient with all other factors at the target composition of 120 mg/mL Nivo (FIG. 16A), 20 mM Histidine (FIG. 16C), 250 mM Sucrose, 50 μM DTPA (FIG. 16D), 5 mM Met (FIG. 16E), 2,000 U/mL rHPH20 (FIG. 16F), 0.05% w/v PS80 at pH 6.0 (FIG. 16B).

[0073] FIG. 17 is a graphical representation of high molecular weight species by SEC at various time points up to 6 months for 25° C., 35° C., and MPL, and RT/RL stress conditions for 0-200 μM DTPA, for Study 2. Composition includes: 120 mg/mL Nivo, 20 mM Histidine, 250 mM Sucrose, 5 mM Met, 0.05% w/v PS80, 2000 U/mL rHuPH20 at pH 6.0.

[0074] FIG. 18 is a graphical representation of high molecular weight species by SEC at various time points up to 6 months for 25° C., 35° C., and MPL, and RT/RL stress conditions separated by formulation DTPA and Met concentrations, for Study 2. Composition includes: 120 mg/mL Nivo, 20 mM Histidine, 250 mM Sucrose, 0.05% w/v PS80, 2000 U/mL rHuPH20 at pH 6.0.

[0075] FIG. 19 is a graphical representation of high molecular weight species by SEC at various time points up to 6 months separated by formulation DTPA and Met concentrations, for Study 2. Composition includes: 120 mg/mL Nivo, 20 mM Histidine, 250 mM Sucrose, 0.05% w/v PS80, 2000 U/mL rHuPH20 at pH 6.0.

[0076] FIG. 20 is a graphical representation of SEC % HMW versus methionine concentration at the three last-sampled stress conditions with a smooth curve trend estimate at 120 mg/mL Nivo, 20 mM histidine, 250 mM sucrose, 50 μM DTPA, 0.05% w/v PS80, 2000 U/mL rHuPH20 at pH 6.0.

[0077] FIGS. 21A-21C are graphical representations of linear regression models for the % total HMW after 6 months at 25° C. 6 month (FIG. 21A), 3 months at 35° C. (FIG. 21B), and 3 months with MPL stress (FIG. 21C) as a function of Met levels with fit performance for formulations containing 120 mg/mL Nivo, 20 mM Histidine, 250 mM Sucrose, 50 μM DTPA, 0.05% w/v PS80, 2000 U/mL rHuPH20 at pH 6.0.

[0078] FIGS. 22A-22B are graphical representations of acidic species as a function of time under MPL condition (FIG. 22A) and 35° C. stress (FIG. 22B). Duplicate samples for formulations with DTPA and Met as well as for DTPA alone. DTPA at 50 μM and 5 mM Met concentrations. The formulation is at 120 mg/mL Nivo, 20 mM Histidine, 250 mM Sucrose, 0.05% w/v PS80, 2,000 U/mLrHuPH20 at pH 6.0.

[0079] FIGS. 23A-23B are graphical representations of enzyme activity as a function of time under MPL condition (FIG. 23A) and 35° C. stress (FIG. 23B). Duplicate samples for formulations with DTPA and Met as well as for DTPA alone. DTPA at 50 μM and 5 mM Met concentrations. The formulation is at 120 mg/mL Nivo, 20 mM Histidine, 250 mM Sucrose, 0.05% w/v PS80, 2,000 U/mLrHuPH20 at pH 6.0.

[0080] FIGS. 24A-24B are graphical representations of PS80 levels as a function of time under MPL condition (FIG. 24A) and 35° C. stress (FIG. 24B). Duplicate samples for formulations with DTPA and Met as well as for DTPA alone. DTPA at 50 μM and 5 mM Met concentrations. The formulation is at 120 mg/mL Nivo, 20 mM histidine, 250 mM sucrose, 0.05% w/v PS80, 2,000 U/mLrHuPH20 at pH 6.0.

[0081] FIG. 25A is a graphical representation illustrating a comparison across study 1, study 2, and study 3 at the high molecular weight species, by SEC at the 3-month timepoint for the MPL condition, separated by with and w/out 2,000 U/mL of rHuPH20 enzyme at various Met levels. FIG. 25B is a regression plot with study 1, study 2, and study 3 for the high molecular weight species by SEC at the 3 month timepoint for the MPL condition as a function of Met. Composition includes 120 mg/mL Nivo, 20 mM Histidine, 250 mM Sucrose, 50 μM DTPA, 0.05% w/v PS80, 2000 U/mL rHuPH20 at pH 6.0 (FIGS. 25A-25B).

[0082] FIG. 26 is a bar graph providing a comparison of log₁₀(kd) for glycine, mannitol, sucrose, trehalose, and succinate, as indicated.

[0083] FIG. 27 is a bar graph showing the average count of the number of excipient molecules interacting with the Nivolumab Fab group during the last 8 ns of the MD simulations for glycine, sorbitol, trehalose, mannitol, and sucrose, as indicated.

[0084] FIGS. 28A-28E are illustrations of the binding poses found for each of glycine (FIG. 28A), sorbitol (FIG. 28B), mannitol (FIG. 28C), sucrose (FIG. 28D), and trehalose (FIG. 28E) on the Nivolumab Fab. The Fab group is displayed as a ribbon, lightly-binding poses are shown in ball and stick representation, and the tightly bound poses are shown in space filling representation.

[0085] FIGS. 29A-29B are bar graphs illustrating the number of unique binding poses found for each excipient (glycine, sorbitol, trehalose, mannitol, and sucrose) in the MD simulations for medium strength interactions (FIG. 29A) and strongly bound interactions (FIG. 29B).

### DETAILED DESCRIPTION OF THE DISCLOSURE

[0086] Current methods of delivering anti-PD-1 and/or anti-PD-L1 antibodies require periodic intravenous administration, administered by a clinician, often in a clinic or hospital. This regimen often creates significant inconvenience for the patient, and the nature of the treatment itself can negatively impact the patient's experience. Subcutaneous delivery, such as through the use of an auto injector or a wearable pump could greatly improve patient compliance, possibly allowing for a patient to receive this potentially life-saving therapy in the comfort of their own home. The present disclosure provides a method of treating a subject in need thereof, comprising subcutaneously administering to the subject a dose of a pharmaceutical composition comprising (i) an antibody that specifically binds PD-1 or PD-L1 and inhibits the interaction of PD-1 and PD-L1 (“an anti-PD-1 antibody” or “an anti-PD-L1 antibody”, respectively). In some aspects, the pharmaceutical composition further comprises (ii) an endoglycosidase hydrolase enzyme. In some aspects, the dose comprises one or more subcutaneous unit doses.

[0087] In some aspects, the pharmaceutical composition does not comprise an endoglycosidase hydrolase enzyme. In some aspects, at least one of the subcutaneous unit doses has a total volume of less than about 5 mL (e.g., less than about 4.5 mL, less than about 4.0 mL, less than about 3.5 mL, less than about 3.0 mL, less than about 3 mL, or less than about 2.5 mL). In certain aspects, the dose comprises at least about 250 mg to at least about 2400 mg of the antibody.

### I. Terms

[0088] In order that the present disclosure can be more readily understood, certain terms are first defined. As used in this application, except as otherwise expressly provided herein, each of the following terms shall have the meaning set forth below. Additional definitions are set forth throughout the application.

[0089] It is understood that wherever aspects are described herein with the language “comprising,” otherwise analogous aspects described in terms of “consisting of” and/or “consisting essentially of” are also provided.

[0090] Unless defined otherwise, all technical and scientific terms used herein have the same meaning as commonly understood by one of ordinary skill in the art to which this disclosure is related. For example, the Concise Dictionary of Biomedicine and Molecular Biology, Juo, Pei-Show, 2nd ed., 2002, CRC Press; The Dictionary of Cell and Molecular Biology, 3rd ed., 1999, Academic Press; and the Oxford Dictionary of Biochemistry And Molecular Biology, Revised, 2000, Oxford University Press, provide one of skill with a general dictionary of many of the terms used in this disclosure.

[0091] Units, prefixes, and symbols are denoted in their Système International de Unites (SI) accepted form. Numeric ranges are inclusive of the numbers defining the range. Unless otherwise indicated, nucleotide sequences are written left to right in 5′ to 3′ orientation. Amino acid sequences are written left to right in amino to carboxy orientation. The headings provided herein are not limitations of the various aspects of the disclosure, which can be had by reference to the specification as a whole. Accordingly, the terms defined immediately below are more fully defined by reference to the specification in its entirety.

[0092] “Administering” refers to the physical introduction of a composition comprising a therapeutic agent to a subject, using any of the various methods and delivery systems known to those skilled in the art. Administration can refer to any form of administration for the immunotherapy, e.g., the anti-PD-1 antibody or the anti-PD-L1 antibody, include intravenous, intramuscular, subcutaneous, intraperitoneal, spinal or other parenteral routes of administration, for example by injection or infusion. The phrases “subcutaneous administration” and “subcutaneous injection” are used interchangeably and refer to modes of administration wherein a substance, e.g., a composition comprising an antibody that specifically binds PD-1 or PD-L1 and inhibits the interaction of PD-1 and PD-L1 is delivered to a subject under the skin, between the dermis and, e.g., the muscle.

[0093] Subcutaneous administration can be achieved using any methods. In some aspects, subcutaneous administration is achieved using a short needle or a plurality of short needles. In some aspects, the needle or at least one of the plurality of needles are less than about 1 inch, less than about ⅞ inches, less than about 6/8 inches, less than about ⅝ inches, are less than about ½ inches. In some aspects, the needle or at least one of the plurality of needles is about ⅝ inches in length.

[0094] Administering can be performed, for example, once, a plurality of times, and/or over one or more extended periods. Thus, as used herein, administering can refer to a single unit dose or more than one unit dose.

[0095] As used herein, the term “dose” or “dosage” is defined as an amount of a therapeutic agent that can be administered at a given point. The dose or dosage can be an amount sufficient to achieve or at least partially achieve a desired effect, but such a desired effect may not be visible or detectable. A “therapeutically effective amount” or “therapeutically effective dosage” of a drug or therapeutic agent is any amount of the drug that, when used alone or in combination with another therapeutic agent, promotes disease regression evidenced by a decrease in severity of disease symptoms, an increase in frequency and duration of disease symptom-free periods, an increase in overall survival (the length of time from either the date of diagnosis or the start of treatment for a disease, such as cancer, that patients diagnosed with the disease are still alive), or a prevention of impairment or disability due to the disease affliction. An amount or dosage of a drug includes a “prophylactically effective amount” or a “prophylactically effective dosage”, which is any amount of the drug that, when administered alone or in combination with another therapeutic agent to a subject at risk of developing a disease or of suffering a recurrence of disease, inhibits the development or recurrence of the disease. The ability of a therapeutic agent to promote disease regression or inhibit the development or recurrence of the disease can be evaluated using a variety of methods available to the skilled practitioner, such as in human subjects during clinical trials, in animal model systems predictive of efficacy in humans, or by assaying the activity of the agent in in vitro assays. A “dose” can comprise a single unit dose or multiple unit doses. In some aspects, the dose comprises a single unit dose. In some aspects, the dose comprises multiple unit doses.

[0096] As used herein, a subcutaneous “unit dose” refers to a single amount of a substance delivered by a subcutaneous injection, e.g., from a single vial, a single auto-injector, and/or a single syringe. In some aspects, multiple subcutaneous doses are administered to achieve a therapeutically effective dose. When multiple unit doses are administered, individual unit doses can be administered at the same time or sequentially. In some aspects, each unit dose of a therapeutically effective dose is administered on the same day. Each unit dose can be administered at the same bodily location or at different bodily locations. In some aspects, a first unit dose is administered at a first bodily location, and a second unit dose is administered at a second bodily location. Any bodily locations known in the art to be suitable for subcutaneous delivery can be used in the methods disclosed herein. In some aspects, at least one subcutaneous unit dose of the dose is administered to a bodily location selected from the arm (e.g., the side or back of an upper arm), the abdomen, and the front of the thigh.

[0097] An “adverse event” (AE) as used herein is any unfavorable and generally unintended or undesirable sign (including an abnormal laboratory finding), symptom, or disease associated with the use of a medical treatment. For example, an adverse event can be associated with activation of the immune system or expansion of immune system cells (e.g., T cells) in response to a treatment. A medical treatment can have one or more associated AEs and each AE can have the same or different level of severity. Reference to methods capable of “altering adverse events” means a treatment regime that decreases the incidence and/or severity of one or more AEs associated with the use of a different treatment regime.

[0098] An “antibody” (Ab) shall include, without limitation, a glycoprotein immunoglobulin which binds specifically to an antigen and comprises at least two heavy (H) chains and two light (L) chains interconnected by disulfide bonds, or an antigen-binding portion thereof. Each H chain comprises a heavy chain variable region (abbreviated herein as V_{H}) and a heavy chain constant region. The heavy chain constant region comprises three constant domains, C_{H1}, C_{H2} and C_{H3}. Each light chain comprises a light chain variable region (abbreviated herein as V_{L}) and a light chain constant region. The light chain constant region comprises one constant domain, C_{L}. The V_{H} and V_{L} regions can be further subdivided into regions of hypervariability, termed complementarity determining regions (CDRs), interspersed with regions that are more conserved, termed framework regions (FRs). Each V_{H} and V_{L} comprises three CDRs and four FRs, arranged from amino-terminus to carboxy-terminus in the following order: FR1, CDR1, FR2, CDR2, FR3, CDR3, and FR4. The variable regions of the heavy and light chains contain a binding domain that interacts with an antigen. The constant regions of the antibodies can mediate the binding of the immunoglobulin to host tissues or factors, including various cells of the immune system (e.g., effector cells) and the first component (C1q) of the classical complement system. Therefore, the term “anti-PD-1 antibody” includes a full antibody having two heavy chains and two light chains that specifically binds to PD-1 and antigen-binding portions of the full antibody. Non-limiting examples of the antigen-binding portions are shown elsewhere herein.

[0099] An immunoglobulin can derive from any of the commonly known isotypes, including but not limited to IgA, secretory IgA, IgG and IgM. IgG subclasses are also well known to those in the art and include but are not limited to human IgG1, IgG2, IgG3 and IgG4. “Isotype” refers to the antibody class or subclass (e.g., IgM or IgG1) that is encoded by the heavy chain constant region genes. The term “antibody” includes, by way of example, both naturally occurring and non-naturally occurring antibodies; monoclonal and polyclonal antibodies; chimeric and humanized antibodies; human or nonhuman antibodies; wholly synthetic antibodies; and single chain antibodies. A nonhuman antibody can be humanized by recombinant methods to reduce its immunogenicity in man. Where not expressly stated, and unless the context indicates otherwise, the term “antibody” also includes an antigen-binding fragment or an antigen-binding portion of any of the aforementioned immunoglobulins, and includes a monovalent and a divalent fragment or portion, and a single chain antibody.

[0100] In some aspects, an “antibody” of the present disclosure is capable of binding to more than one antigen, e.g., a “multispecific” antibody. As used herein, a “bispecific” antibody is an antibody that is capable of specifically binding two antigens, wherein the first and second antigen are the same or different. As used herein, a “multispecific” antibody is capable of specifically binding more than one antigen, e.g., at least two (i.e., a “bispecific” antibody), at least three (i.e., a “trispecific” antibody), at least four, at least five, or at least six antigens. Various multispecific antibodies are known and can be used in the compositions and/or methods disclosed herein, including but not limited to bispecific antibodies that bind PD-1 and a second target and bispecific antibodies that bind PD-L1 and a second target. In some aspects, the multispecific antibody is a T-cell dependent bispecific antibody. In some aspects, the multispecific antibody is an anti-FcRH5/CD3 bispecific antibody that targets the B cell lineage marker, FcRH5, and CD3, e.g., for use in the treatment of multiple myeloma.

[0101] In some aspects, an “antibody” of the present disclosure is engineered to be activated at a target site, e.g., a “probody.” In some aspects, the antibody, e.g., probody, is proteolytically cleaved at a target tissue (e.g., a tumor).

[0102] An “isolated antibody” refers to an antibody that is substantially free of other antibodies having different antigenic specificities (e.g., an isolated antibody that binds specifically to PD-1 is substantially free of antibodies that bind specifically to antigens other than PD-1). An isolated antibody that binds specifically to PD-1 may, however, have cross-reactivity to other antigens, such as PD-1 molecules from different species. Moreover, an isolated antibody can be substantially free of other cellular material and/or chemicals.

[0103] The term “monoclonal antibody” (mAb) refers to a non-naturally occurring preparation of antibody molecules of single molecular composition, i.e., antibody molecules whose primary sequences are essentially identical, and which exhibits a single binding specificity and affinity for a particular epitope. A monoclonal antibody is an example of an isolated antibody. Monoclonal antibodies can be produced by hybridoma, recombinant, transgenic or other techniques known to those skilled in the art.

[0104] A “human antibody” (HuMAb) refers to an antibody having variable regions in which both the framework and CDR regions are derived from human germline immunoglobulin sequences. Furthermore, if the antibody contains a constant region, the constant region also is derived from human germline immunoglobulin sequences. The human antibodies of the disclosure can include amino acid residues not encoded by human germline immunoglobulin sequences (e.g., mutations introduced by random or site-specific mutagenesis in vitro or by somatic mutation in vivo). However, the term “human antibody,” as used herein, is not intended to include antibodies in which CDR sequences derived from the germline of another mammalian species, such as a mouse, have been grafted onto human framework sequences. The terms “human antibody” and “fully human antibody” and are used synonymously.

[0105] A “humanized antibody” refers to an antibody in which some, most or all of the amino acids outside the CDRs of a non-human antibody are replaced with corresponding amino acids derived from human immunoglobulins. In one aspect of a humanized form of an antibody, some, most or all of the amino acids outside the CDRs have been replaced with amino acids from human immunoglobulins, whereas some, most or all amino acids within one or more CDRs are unchanged. Small additions, deletions, insertions, substitutions or modifications of amino acids are permissible as long as they do not abrogate the ability of the antibody to bind to a particular antigen. A “humanized antibody” retains an antigenic specificity similar to that of the original antibody.

[0106] A “chimeric antibody” refers to an antibody in which the variable regions are derived from one species and the constant regions are derived from another species, such as an antibody in which the variable regions are derived from a mouse antibody and the constant regions are derived from a human antibody.

[0107] An “anti-antigen antibody” refers to an antibody that binds specifically to the antigen. For example, an anti-PD-1 antibody binds specifically to PD-1, and an anti-PD-L1 antibody binds specifically to PD-L1.

[0108] An “antigen-binding portion” of an antibody (also called an “antigen-binding fragment”) refers to one or more fragments of an antibody that retain the ability to bind specifically to the antigen bound by the whole antibody. It has been shown that the antigen-binding function of an antibody can be performed by fragments of a full-length antibody. Examples of binding fragments encompassed within the term “antigen-binding portion” of an antibody, e.g., an anti-PD-1 antibody or an anti-PD-L1 antibody described herein, include (i) a Fab fragment (fragment from papain cleavage) or a similar monovalent fragment consisting of the V_{L}, V_{H}, LC and CH1 domains; (ii) a F(ab′)2 fragment (fragment from pepsin cleavage) or a similar bivalent fragment comprising two Fab fragments linked by a disulfide bridge at the hinge region; (iii) a Fd fragment consisting of the V_{H} and CH1 domains; (iv) a Fv fragment consisting of the V_{L} and V_{H} domains of a single arm of an antibody, (v) a dAb fragment (Ward et al., (1989) Nature 341:544-546), which consists of a V_{H} domain; (vi) an isolated complementarity determining region (CDR) and (vii) a combination of two or more isolated CDRs which can optionally be joined by a synthetic linker. Furthermore, although the two domains of the Fv fragment, V_{L} and V_{H}, are coded for by separate genes, they can be joined, using recombinant methods, by a synthetic linker that enables them to be made as a single protein chain in which the V_{L} and V_{H} regions pair to form monovalent molecules (known as single chain Fv (scFv); see. e.g., Bird et al. (1988) Science 242:423-426; and Huston et al. (1988) Proc. Natl. Acad. Sci. USA 85:5879-5883). Such single chain antibodies are also intended to be encompassed within the term “antigen-binding portion” of an antibody. These antibody fragments are obtained using conventional techniques known to those with skill in the art, and the fragments are screened for utility in the same manner as are intact antibodies. Antigen-binding portions can be produced by recombinant DNA techniques, or by enzymatic or chemical cleavage of intact immunoglobulins.

[0109] A “cancer” refers a broad group of various diseases characterized by the uncontrolled growth of abnormal cells in the body. Unregulated cell division and growth divide and grow results in the formation of malignant tumors that invade neighboring tissues and can also metastasize to distant parts of the body through the lymphatic system or bloodstream.

[0110] The term “immunotherapy” refers to the treatment of a subject afflicted with, or at risk of contracting or suffering a recurrence of, a disease by a method comprising inducing, enhancing, suppressing or otherwise modifying an immune response. “Treatment” or “therapy” of a subject refers to any type of intervention or process performed on, or the administration of an active agent to, the subject with the objective of reversing, alleviating, ameliorating, inhibiting, slowing down or preventing the onset, progression, development, severity or recurrence of a symptom, complication or condition, or biochemical indicia associated with a disease.

[0111] “Programmed Death-1” (PD-1) refers to an immunoinhibitory receptor belonging to the CD28 family. PD-1 is expressed predominantly on previously activated T cells in vivo, and binds to two ligands, PD-L1 and PD-L2. The term “PD-1” as used herein includes human PD-1 (hPD-1), variants, isoforms, and species homologs of hPD-1, and analogs having at least one common epitope with hPD-1. The complete hPD-1 sequence can be found under GenBank Accession No. U64863.

[0112] “Programmed Death Ligand-1” (PD-L1) is one of two cell surface glycoprotein ligands for PD-1 (the other being PD-L2) that downregulate T cell activation and cytokine secretion upon binding to PD-1. The term “PD-L1” as used herein includes human PD-L1 (hPD-L1), variants, isoforms, and species homologs of hPD-L1, and analogs having at least one common epitope with hPD-L1. The complete hPD-L1 sequence can be found under GenBank Accession No. Q9NZQ7. The human PD-L1 protein is encoded by the human CD274 gene (NCBI Gene ID: 29126).

[0113] “Hyaluronidase,” as used herein, refers to an enzyme capable of catalyzing the cleavage of hyaluronan. Hyaluronan is a repeating polymer of N-acetyl-glucosamine and glucuronic acid, which is present in the subcutaneous space and contributes to the soluble gel-like component of the extracellular matrix of the skin and is restored by rapid turnover (resynthesis). In some aspects, the hyaluronidase comprises rHuPH20, which is a glycosylated 447-amino acid single chain polypeptide that depolymerizes hyaluronan in the subcutaneous space locally at the site of injection in the skin. Depolymerization of hyaluronan by hyaluronidase is accomplished by hydrolysis of the polysaccharide polymer. Depolymerization of hyaluronan results in a transient reduction in the viscosity of the gel-like phase of the extracellular matrix and increased hydraulic conductance that facilitates the dispersion and absorption of the coadministered therapeutic agent. Thus, a hyaluronidase, e.g., rHuPH20, can improve the speed and ease of subcutaneous delivery of injectable biologics and drugs by acting as a permeation enhancer. In certain aspects, the hyaluronidase comprises ENHANZE™.

[0114] A “subject” includes any human or nonhuman animal. The term “nonhuman animal” includes, but is not limited to, vertebrates such as nonhuman primates, sheep, dogs, and rodents such as mice, rats and guinea pigs. In preferred aspects, the subject is a human. The terms, “subject” and “patient” are used interchangeably herein.

[0115] The use of the term “flat dose” with regard to the methods and dosages of the disclosure means a dose that is administered to a patient without regard for the weight or body surface area (BSA) of the patient. The flat dose is therefore not provided as a mg/kg dose, but rather as an absolute amount of the agent (e.g., the anti-PD-1 antibody). For example, a 60 kg person and a 100 kg person would receive the same dose of an antibody (e.g., 240 mg of an anti-PD-1 antibody).

[0116] The term “weight-based dose” as referred to herein means that a dose that is administered to a patient is calculated based on the weight of the patient. For example, when a patient with 60 kg body weight requires 3 mg/kg of an anti-PD-1 antibody, one can calculate and use the appropriate amount of the anti-PD-1 antibody (i.e., 180 mg) for administration.

[0117] By way of example, an “anti-cancer agent” promotes cancer regression in a subject. In some aspects, a therapeutically effective amount of the drug promotes cancer regression to the point of eliminating the cancer. “Promoting cancer regression” means that administering a therapeutically effective amount of the drug, alone or in combination with an anti-neoplastic agent, results in a reduction in tumor growth or size, necrosis of the tumor, a decrease in severity of at least one disease symptom, an increase in frequency and duration of disease symptom-free periods, or a prevention of impairment or disability due to the disease affliction. In addition, the terms “effective” and “effectiveness” with regard to a treatment includes both pharmacological effectiveness and physiological safety. Pharmacological effectiveness refers to the ability of the drug to promote cancer regression in the patient. Physiological safety refers to the level of toxicity, or other adverse physiological effects at the cellular, organ and/or organism level (adverse effects) resulting from administration of the drug.

[0118] By way of example for the treatment of tumors, a therapeutically effective amount of an anti-cancer agent preferably inhibits cell growth or tumor growth by at least about 20%, more preferably by at least about 40%, even more preferably by at least about 60%, and still more preferably by at least about 80% relative to untreated subjects. In other preferred aspects of the disclosure, tumor regression can be observed and continue for a period of at least about 20 days, more preferably at least about 40 days, or even more preferably at least about 60 days. Notwithstanding these ultimate measurements of therapeutic effectiveness, evaluation of immunotherapeutic drugs must also make allowance for immune-related response patterns.

[0119] An “immune response” is as understood in the art, and generally refers to a biological response within a vertebrate against foreign agents or abnormal, e.g., cancerous cells, which response protects the organism against these agents and diseases caused by them. An immune response is mediated by the action of one or more cells of the immune system (for example, a T lymphocyte, B lymphocyte, natural killer (NK) cell, macrophage, eosinophil, mast cell, dendritic cell or neutrophil) and soluble macromolecules produced by any of these cells or the liver (including antibodies, cytokines, and complement) that results in selective targeting, binding to, damage to, destruction of, and/or elimination from the vertebrate's body of invading pathogens, cells or tissues infected with pathogens, cancerous or other abnormal cells, or, in cases of autoimmunity or pathological inflammation, normal human cells or tissues. An immune reaction includes, e.g., activation or inhibition of a T cell, e.g., an effector T cell, a Th cell, a CD4⁺ cell, a CD8⁺ T cell, or a Treg cell, or activation or inhibition of any other cell of the immune system, e.g., NK cell.

[0120] An “immune-related response pattern” refers to a clinical response pattern often observed in cancer patients treated with immunotherapeutic agents that produce antitumor effects by inducing cancer-specific immune responses or by modifying native immune processes. This response pattern is characterized by a beneficial therapeutic effect that follows an initial increase in tumor burden or the appearance of new lesions, which in the evaluation of traditional chemotherapeutic agents would be classified as disease progression and would be synonymous with drug failure. Accordingly, proper evaluation of immunotherapeutic agents can require long-term monitoring of the effects of these agents on the target disease.

[0121] As used herein, the term “stable,” in reference to a formulation or drug product, is one in which an antibody, antibodies, or molecules therein essentially retain their physical and chemical stability and integrity upon storage. Stability of a formulation herein can be measured at selected temperatures after selected time periods. For example, an increase in aggregate formation or low molecular weight species are indicators of instability. Retention of original clarity and/or color throughout shelf-life are also indicators utilized to monitor stability. In some aspects, a “stable” drug product is one wherein an increase in aggregation, as measured by an increase in the percentage of high molecular weight species (% HMW), is less than about 5%, and preferably less than about 3%, when the formulation is stored at 2-8° C. for at least about one year.

[0122] The terms “treat,” “treating,” and “treatment,” as used herein, refer to any type of intervention or process performed on, or administering an active agent to, the subject with the objective of reversing, alleviating, ameliorating, inhibiting, or slowing down or preventing the progression, development, severity or recurrence of a symptom, complication, condition or biochemical indicia associated with a disease or enhancing overall survival. Treatment can be of a subject having a disease or a subject who does not have a disease (e.g., for prophylaxis).

[0123] The terms “about every week,” “about every two weeks,” or any other similar dosing interval terms as used herein mean approximate numbers. “About every week” can include every seven days ± one day, i.e., every six days to every eight days. “About every two weeks” can include every fourteen days ±three days, i.e., every eleven days to every seventeen days. Similar approximations apply, for example, to about every three weeks, about every four weeks, about every five weeks, about every six weeks, and about every twelve weeks. In some aspects, a dosing interval of about every six weeks or about every twelve weeks means that the first dose can be administered any day in the first week, and then the next dose can be administered any day in the sixth or twelfth week, respectively. In other aspects, a dosing interval of about every six weeks or about every twelve weeks means that the first dose is administered on a particular day of the first week (e.g., Monday) and then the next dose is administered on the same day of the sixth or twelfth weeks (i.e., Monday), respectively. When multiple subcutaneous unit doses are administered to reach a dose, the dosing interval refers to the period of time between administration of the first subcutaneous unit dose of the first effective dose and the first subcutaneous unit dose of the second effective dose. For example, where the method comprises administering a dose of about 600 mg administered about every two weeks, wherein the dose of the antibody comprises two subcutaneous unit doses, wherein each of the two subcutaneous unit doses comprises about 300 mg of the antibody, a first subcutaneous unit dose of about 300 mg of the first effective dose of the antibody is administered on day 1 and a first subcutaneous unit dose of about 300 mg of the second effective dose of the antibody is administered on about day 14. In this example, the second unit dose of about 300 mg of the first effective dose of the antibody can be administered on day 1 or at any other time before the administration of the first subcutaneous unit dose of about 300 mg of the second effective dose of the antibody.

[0124] The use of the alternative (e.g., “or”) should be understood to mean either one, both, or any combination thereof of the alternatives. As used herein, the indefinite articles “a” or “an” should be understood to refer to “one or more” of any recited or enumerated component.

[0125] The terms “about” or “comprising essentially of” refer to a value or composition that is within an acceptable error range for the particular value or composition as determined by one of ordinary skill in the art, which will depend in part on how the value or composition is measured or determined, i.e., the limitations of the measurement system. For example, “about” or “comprising essentially of” can mean within 1 or more than 1 standard deviation per the practice in the art. Alternatively, “about” or “comprising essentially of” can mean a range of up to 10%. Furthermore, particularly with respect to biological systems or processes, the terms can mean up to an order of magnitude or up to 5-fold of a value. When particular values or compositions are provided in the application and claims, unless otherwise stated, the meaning of “about” or “comprising essentially of” should be assumed to be within an acceptable error range for that particular value or composition.

[0126] As described herein, any concentration range, percentage range, ratio range or integer range is to be understood to include the value of any integer within the recited range and, when appropriate, fractions thereof (such as one tenth and one hundredth of an integer), unless otherwise indicated.

[0127] Various aspects of the disclosure are described in further detail in the following subsections.

### II. Methods of the Disclosure

[0128] Some aspects of the present disclosure are directed to methods of treating a subject in need thereof, comprising subcutaneously administering to the subject a dose of a pharmaceutical composition comprising (i) an antibody that specifically binds PD-1 or PD-L1 and inhibits the interaction of PD-1 and PD-L1 (“an anti-PD-1 antibody” or “an anti-PD-L1 antibody”, respectively). In some aspects, the pharmaceutical composition comprises (ii) an endoglycosidase hydrolase enzyme. In some aspects, the dose can be a therapeutically effective dose. In some aspects, the dose comprises one or more subcutaneous unit doses. In some aspects, the dose comprises at least about 300 mg to at least about 2400 mg of the anti-PD-1 antibody or the anti-PD-L1 antibody.

[0129] In some aspects, the pharmaceutical composition does not comprise an endoglycosidase hydrolase enzyme. In some aspects, at least one of the subcutaneous unit doses has a total volume of less than about 5 mL (e.g., less than about 4.5 mL, less than about 4.0 mL, less than about 3.5 mL, less than about 3.0 mL, less than about 3 mL, or less than about 2.5 mL. In certain aspects, the therapeutically effective dose comprises at least about 250 mg to at least about 2400 mg of the antibody. In some aspects, the pharmaceutical composition does not comprise an enzyme that facilitates subcutaneous delivery. In certain aspects, the pharmaceutical composition does not comprise a hyaluronidase.

[0130] II.A. Dosing

[0131] In some aspects, a therapeutically effective dose of the antibody comprises a single subcutaneous unit dose, e.g., the entire dose is administered as a single unit dose. In some aspects, a therapeutically effective dose of the antibody comprises two or more subcutaneous unit doses, e.g., the effective unit dose is divided into two or more subcutaneous unit doses. In some aspects, the therapeutically effective dose of the antibody comprises at least two subcutaneous unit doses. In some aspects, the therapeutically effective dose of the antibody comprises at least three subcutaneous unit doses. In some aspects, the therapeutically effective dose of the antibody comprises at least four subcutaneous unit doses. In some aspects, the therapeutically effective dose of the antibody comprises at least five subcutaneous unit doses. In some aspects, the therapeutically effective dose of the antibody comprises at least six subcutaneous unit doses. In some aspects, the therapeutically effective dose of the antibody comprises at least seven subcutaneous unit doses. In some aspects, the therapeutically effective dose of the antibody comprises at least eight subcutaneous unit doses. In some aspects, the therapeutically effective dose of the antibody comprises at least nine subcutaneous unit doses. In some aspects, the therapeutically effective dose of the antibody comprises ten or more subcutaneous unit doses.

[0132] In some aspects, each subcutaneous unit dose is administered on the same day. In some aspects, one or more subcutaneous unit doses are administered on a first day, and one or more subcutaneous unit doses of the same therapeutically effective dose are administered on a second day. In some aspects, a first subcutaneous unit dose and a second subcutaneous unit dose are administered sequentially. In some aspects, a first subcutaneous unit dose and a second subcutaneous unit dose of the same effective dose are administered sequentially, wherein the second subcutaneous unit dose is administered less than about 5 minutes, less than about 10 minutes, less than about 15 minutes, less than about 20 minutes, less than about 25 minutes, less than about 30 minutes, less than about 45 minutes, less than about 60 minutes, less than about 75 minutes, less than about 90 minutes, less than about 2 hours, less than about 2.5 hours, less than about 3 hours, less than about 3.5 hours, less than about 4 hours, less than about 4.5 hours, less than about 5 hours, less than about 5.5 hours, less than about 6 hours, less than about 7 hours, less than about 8 hours, less than about 9 hours, less than about 12 hours, less than about 18 hours, or less than about 24 hours after the first subcutaneous unit dose. In some aspects, the two or more subcutaneous unit doses are administered subsequently, wherein each of the two or more subcutaneous unit doses is administered within an interval of less than about 10 minutes, less than about 15 minutes, less than about 20 minutes, less than about 25 minutes, less than about 30 minutes, less than about 45 minutes, less than about 1 hour, less than about 2 hours, less than about 3 hours, less than about 4 hours, less than about 5 hours, less than about 6 hours, less than about 7 hours, less than about 8 hours, less than about 9 hours, less than about 10 hours, less than about 11 hours, less than about 12 hours, less than about 15 hours, less than about 18 hours, less than about 21 hours, or less than about 24 hours between the subcutaneous unit doses.

[0133] In some aspects, the one or more subcutaneous unit doses are administered at one or more bodily location. In some aspects, a first subcutaneous unit dose and a second subcutaneous unit dose are administered at the same bodily location. In some aspects, a first subcutaneous unit dose and a second subcutaneous unit dose are administered at a first bodily location and a second bodily location, wherein the first bodily location is not the same as the second bodily location. In some aspects, a first subcutaneous unit dose and a second subcutaneous unit dose are administered at a first bodily location, and a third subcutaneous unit dose is administered at a second bodily location, wherein the first bodily location is not the same as the second bodily location. In some aspects, a first subcutaneous unit dose and a second subcutaneous unit dose are administered at a first bodily location, and a third subcutaneous unit dose and a fourth subcutaneous dose is administered at a second bodily location, wherein the first bodily location is not the same as the second bodily location. In some aspects, a first subcutaneous unit dose is administered at a first bodily location, a second subcutaneous unit dose is administered at a second bodily location, and a third subcutaneous unit dose is administered at a third bodily location, wherein the first bodily location, the second bodily location, and the third bodily location are different. In some aspects, a first subcutaneous unit dose is administered at a first bodily location, a second subcutaneous unit dose is administered at a second bodily location, a third subcutaneous unit dose is administered at a third bodily location, and a fourth subcutaneous unit dose is administered at a fourth bodily location, wherein the first bodily location, the second bodily location, the third bodily location, and the fourth bodily location are different.

[0134] As used herein, where at least two subcutaneous unit doses are administered at the same bodily location, the two subcutaneous doses can be administered at the exact same injection site or at a nearby injection site within the same bodily location. For example, two subcutaneous doses administered to a singly bodily location can both be administered to the subject's right arm. In this example, so long as both subcutaneous doses are administered to, e.g., the right arm, then both subcutaneous unit doses are administered to the same “bodily location,” as used herein.

[0135] The therapeutically effective dose and/or the subcutaneous dose can be administered subcutaneously as disclosed herein using any methods or devices. In some aspects, the therapeutically effective dose and/or the subcutaneous dose is administered using a syringe. In some aspects, the therapeutically effective dose and/or the subcutaneous dose is administered using an autoinjector. In some aspects, the therapeutically effective dose and/or the subcutaneous dose is administered using an injector pen. In some aspects, the therapeutically effective dose and/or the subcutaneous dose is administered using a wearable pump.

[0136] In some aspects, the therapeutically effective dose and/or the subcutaneous unit dose are administered by subcutaneous infusion for less than about 30 minutes, less than about 25 minutes, less than about 20 minutes, less than about 15 minutes, less than about 14 minutes, less than about 13 minutes, less than about 12 minutes, less than about 11 minutes, less than about 10 minutes, less than about 9 minutes, less than about 8 minutes, less than about 7 minutes, less than about 6 minutes, less than about 5 minutes, less than about 4 minutes, less than about 3 minutes, or less than about 2 minutes. In some aspects, the therapeutically effective dose and/or the subcutaneous unit dose are administered by subcutaneous infusion for less than about 90 seconds, less than about 75 seconds, less than about 60 seconds, less than about 45 seconds, less than about 30 seconds, less than about 15 seconds, or less than about 10 seconds. In some aspects, the therapeutically effective dose and/or the subcutaneous unit dose are administered by subcutaneous infusion for less than about 15 minutes. In some aspects, the therapeutically effective dose and/or the subcutaneous unit dose are administered by subcutaneous infusion for less than about 10 minutes. In some aspects, the therapeutically effective dose and/or the subcutaneous unit dose are administered by subcutaneous infusion for less than about 5 minutes. In some aspects, the therapeutically dose and/or the subcutaneous dose are administered by subcutaneous infusion for less than about 4 minutes. In some aspects, the therapeutically effective dose and/or the subcutaneous dose are administered by subcutaneous infusion for less than about 3 minutes. In some aspects, the therapeutically effective dose and/or the subcutaneous unit dose are administered by subcutaneous infusion for less than about 2 minutes.

[0137] II.A.1. Anti-PD-1 Antibody Dosing

[0138] In certain aspects of the present disclosure, the antibody comprises an anti-PD-1 antibody. Any anti-PD-1 antibody can be used in the methods disclosed herein. In some aspects, the anti-PD-1 antibody comprises nivolumab. In some aspects, the anti-PD-1 antibody comprises pembrolizumab.

[0139] In some aspects, the dose of the antibody, e.g., the anti-PD-1 antibody (e.g., nivolumab), is about 250 mg to about 600 mg of the antibody administered about every week. In some aspects, the dose of the antibody, e.g., the anti-PD-1 antibody (e.g., nivolumab), is about 250 mg to about 550 mg, about 250 mg to about 500 mg, about 250 mg to about 450 mg, about 250 mg to about 400 mg, about 250 mg to about 350 mg, about 250 mg to about 300 mg, about 275 mg to about 400 mg, about 275 mg to about 375 mg, about 275 mg to about 350 mg, about 275 mg to about 325 mg, about 275 mg to about 300 mg, about 300 mg to about 600 mg, about 300 mg to about 550 mg, about 300 mg to about 400 mg, about 300 mg to about 450 mg, about 300 mg to about 400 mg, about 300 mg to about 350 mg, or about 300 mg to about 325 mg of the antibody administered about every week. In some aspects, the dose of the antibody, e.g., the anti-PD-1 antibody (e.g., nivolumab), is about 250 mg to about 400 mg of the antibody administered about every week. In some aspects, the dose of the antibody, e.g., the anti-PD-1 antibody (e.g., nivolumab), is about 250 mg to about 350 mg of the antibody administered about every week. In some aspects, the dose of the antibody, e.g., the anti-PD-1 antibody (e.g., nivolumab), is about 275 mg to about 325 mg of the antibody administered about every week.

[0140] In some aspects, the dose of the antibody is about 250 mg, about 260 mg, about 270 mg, about 275 mg, about 280 mg, about 290 mg, about 300 mg, about 310 mg, about 320 mg, about 325 mg, about 330 mg, about 340 mg, about 350 mg, about 360 mg, about 370 mg, about 375 mg, about 380 mg, about 390 mg, about 400 mg, about 410 mg, about 420 mg, about 425 mg, about 430 mg, about 440 mg, about 450 mg, about 460 mg, about 470 mg, about 475 mg, about 480 mg, about 490 mg, about 500 mg, about 510 mg, about 520 mg, about 525 mg, about 530 mg, about 540 mg, about 550 mg, about 560 mg, about 570 mg, about 575 mg, about 580 mg, about 590 mg, or about 600 mg administered about every week. In certain aspects, the dose of the antibody is about 250 mg administered about every week. In certain aspects, the dose of the antibody is about 275 mg administered about every week. In certain aspects, the dose of the antibody is about 300 mg administered about every week. In certain aspects, the dose of the antibody is about 325 mg administered about every week. In certain aspects, the dose of the antibody is about 350 mg administered about every week.

[0141] In some aspects, the dose of the antibody comprises a single subcutaneous unit dose of about 300 mg. In some aspects, the dose of the antibody comprises a single subcutaneous unit dose of about 300 mg in a total administered volume of about 2 mL. In some aspects, the dose of the antibody comprises a single subcutaneous unit dose of about 300 mg in a total administered volume of greater than about 2 mL. In some aspects, the dose of the antibody comprises two subcutaneous unit doses, wherein each of the two subcutaneous unit doses comprises about 150 mg of the antibody. In some aspects, at least one of the two subcutaneous unit doses comprises about 150 mg of the antibody in a total volume of less than about 5 mL (e.g., less than about 4.5 mL, less than about 4.0 mL, less than about 3.5 mL, less than about 3.0 mL, less than about 2.5 mL, or less than about 2.0 mL). In some aspects, the two subcutaneous unit doses are administered to the subject at two different bodily locations.

[0142] In some aspects, the dose comprises three subcutaneous unit doses, wherein each of the three subcutaneous unit doses comprises about 100 mg of the antibody. In some aspects, at least one of the three subcutaneous unit doses comprises about 100 mg of the antibody in a total volume of about 5 mL (e.g., less than about 4.5 mL, less than about 4.0 mL, less than about 3.5 mL, less than about 3.0 mL, less than about 2.5 mL, or less than about 2.0 mL). In some aspects, at least two of the three subcutaneous unit doses are administered to the subject at least two different bodily locations. In some aspects, the first subcutaneous unit dose and the second subcutaneous unit dose are administered at a first bodily location, and the third subcutaneous unit dose is administered at a second bodily location. In some aspects, the first subcutaneous unit dose is administered at a first bodily location, the second subcutaneous unit dose is administered at a second bodily location, and the third subcutaneous unit dose is administered at a third bodily location.

[0143] In some aspects, the dose of the antibody, e.g., the anti-PD-1 antibody (e.g., nivolumab), is about 300 mg to about 900 mg of the antibody administered about every two weeks. In some aspects, the dose of the antibody, e.g., the anti-PD-1 antibody (e.g., nivolumab), is about 300 mg to about 850 mg, about 300 mg to about 800 mg, about 300 mg to about 750 mg, about 300 mg to about 700 mg, about 300 mg to about 650 mg, about 300 mg to about 600 mg, about 350 mg to about 900 mg, about 350 mg to about 850 mg, about 350 mg to about 800 mg, about 350 mg to about 750 mg, about 350 mg to about 700 mg, about 350 mg to about 650 mg, about 350 mg to about 600 mg, about 400 mg to about 900 mg, about 400 mg to about 850 mg, about 400 mg to about 800 mg, about 400 mg to about 750 mg, about 400 mg to about 700 mg, about 400 mg to about 650 mg, about 400 mg to about 600 mg, about 450 to about 900 mg, about 450 to about 850 mg, about 450 to about 800 mg, about 450 mg to about 750 mg, about 450 mg to about 700 mg, about 450 mg to about 650 mg, about 450 mg to about 600 mg, about 500 mg to about 900 mg, about 500 mg to about 850 mg, about 500 mg to about 800 mg, about 500 mg to about 700 mg, about 500 mg to about 650 mg, about 500 mg to about 600 mg, about 550 mg to about 900 mg, about 550 mg to about 850 mg, about 550 mg to about 800 mg, about 550 mg to about 750 mg, about 550 mg to about 700 mg, about 550 mg to about 650 mg, about 550 mg to about 600 mg, about 600 mg to about 900 mg, about 600 mg to about 850 mg, about 600 mg to about 800 mg, about 600 mg to about 750 mg, about 600 mg to about 700 mg, about 600 mg to about 650 mg, about 575 mg to about 625 mg, about 575 mg to about 600 mg, or about 600 mg to about 625 mg of the antibody administered about every two weeks. In some aspects, the dose of the antibody, e.g., the anti-PD-1 antibody (e.g., nivolumab), is about 400 mg to about 800 mg of the antibody administered about every two weeks. In some aspects, the dose of the antibody, e.g., the anti-PD-1 antibody (e.g., nivolumab), is about 500 mg to about 700 mg of the antibody administered about every two weeks. In some aspects, the dose of the antibody, e.g., the anti-PD-1 antibody (e.g., nivolumab), is about 550 mg to about 650 mg of the antibody administered about every two weeks. In some aspects, the dose of the antibody, e.g., the anti-PD-1 antibody (e.g., nivolumab), is about 575 mg to about 625 mg of the antibody administered about every two weeks.

[0144] In some aspects, the dose of the antibody is about 300 mg, about 350 mg, about 400 mg, about 450 mg, about 500 mg, about 510 mg, about 520 mg, about 530 mg, about 540 mg, about 550 mg, about 560 mg, about 570 mg, about 580 mg, about 590 mg, about 600 mg, about 610 mg, about 620 mg, about 630 mg, about 640 mg, about 650 mg, about 660 mg, about 670 mg, about 680 mg, about 690 mg, about 700 mg, about 710 mg, about 720 mg, about 730 mg, about 740 mg, about 750 mg, about 760 mg, about 770 mg, about 780 mg, about 790 mg, about 800 mg, about 810 mg, about 820 mg, about 830 mg, about 840 mg, about 850 mg, about 860 mg, about 870 mg, about 880 mg, about 890 mg, or about 900 mg administered about every two weeks. In some aspects, the dose of the antibody is about 500 mg administered about every two weeks. In some aspects, the dose of the antibody is about 550 mg administered about every two weeks. In some aspects, the dose of the antibody is about 575 mg administered about every two weeks. In some aspects, the dose of the antibody is about 600 mg administered about every two weeks. In some aspects, the dose of the antibody is about 625 mg administered about every two weeks. In some aspects, the dose of the antibody is about 650 mg administered about every two weeks. In some aspects, the dose of the antibody is about 700 mg administered about every two weeks.

[0145] In some aspects, the dose of the antibody comprises a single subcutaneous unit dose of about 600 mg. In some aspects, the dose of the antibody comprises a single subcutaneous unit dose of about 600 mg in a total administered volume of about 2 mL. In some aspects, the dose of the antibody comprises a single subcutaneous unit dose of about 600 mg in a total administered volume of greater than about 2 mL. In some aspects, the dose of the antibody comprises a single subcutaneous unit dose of about 600 mg in a total administered volume of greater than about 5 mL.

[0146] In some aspects, the dose of the antibody comprises a single subcutaneous unit dose of about 600 mg in a total administered volume of less than about 5 mL (e.g., less than about 4.5 mL, less than about 4.0 mL, less than about 3.5 mL, less than about 3.0 mL, less than about 2.5 mL, or less than about 2.0 mL).

[0147] In some aspects, the dose of the antibody comprises two subcutaneous unit doses, wherein each of the two subcutaneous unit doses comprises about 300 mg of the antibody. In some aspects, at least one of the two subcutaneous unit doses comprises about 300 mg of the antibody in a total volume of about 2 mL. In some aspects, at least one of the two subcutaneous unit doses comprises about 300 mg of the antibody in a total volume of greater than about 2 mL. In some aspects, at least one of the two subcutaneous unit doses comprises about 300 mg of the antibody in a total volume of greater than about 5 mL. In some aspects, at least one of the two subcutaneous unit doses comprises about 300 mg of the antibody in a total volume of less than about 5 mL (e.g., less than about 4.5 mL, less than about 4.0 mL, less than about 3.5 mL, less than about 3.0 mL, less than about 2.5 mL, or less than about 2.0 mL). In certain aspects, at least one of the two subcutaneous unit doses comprises about 300 mg of the antibody in a total volume of less than about 2 mL. In some aspects, the two subcutaneous unit doses are administered to the subject at a single bodily location. In some aspects, the two subcutaneous unit doses are administered to the subject at two different bodily locations.

[0148] In some aspects, the dose of about 600 mg of the antibody comprises three subcutaneous unit doses. In some aspects, at least one of the three subcutaneous unit doses comprises about 200 mg of the antibody. In some aspects, each of the three subcutaneous unit doses comprises about 200 mg of the antibody. In some aspects, at least one of the three subcutaneous unit doses comprises about 200 mg of the antibody in a total volume of about 2 mL. In some aspects, at least one of the three subcutaneous unit doses comprises about 200 mg of the antibody in a total volume of greater than about 2 mL. In some aspects, at least one of the three subcutaneous unit doses comprises about 200 mg of the antibody in a total volume of greater than about 5 mL. In some aspects, at least one of the three subcutaneous unit doses comprises about 200 mg of the antibody in a total volume of less than about 5 mL (e.g., less than about 4.5 mL, less than about 4.0 mL, less than about 3.5 mL, less than about 3.0 mL, less than about 2.5 mL, or less than about 2.0 mL). In some aspects, at least two of the three subcutaneous unit doses are administered to the subject at least two different bodily locations. In some aspects, the first subcutaneous unit dose and the second subcutaneous unit dose are administered at a first bodily location, and the third subcutaneous unit dose is administered at a second bodily location. In some aspects, the first subcutaneous unit dose is administered at a first bodily location, the second subcutaneous unit dose is administered at a second bodily location, and the third subcutaneous unit dose is administered at a third bodily location.

[0149] In some aspects, the dose of about 600 mg of the antibody comprises at least four subcutaneous unit doses. In some aspects, at least one of the four subcutaneous unit doses comprises about 150 mg of the antibody. In some aspects, at least one of the four subcutaneous unit doses comprises about 150 mg of the antibody in a total volume of about 2 mL. In some aspects, at least one of the four subcutaneous unit doses comprises about 150 mg of the antibody in a total volume of greater than about 2 mL. In some aspects, at least one of the four subcutaneous unit doses comprises about 150 mg of the antibody in a total volume of greater than about 5 mL. In some aspects, at least one of the four subcutaneous unit doses comprises about 150 mg of the antibody in a total volume of less than about 5 mL (e.g., less than about 4.5 mL, less than about 4.0 mL, less than about 3.5 mL, less than about 3.0 mL, less than about 2.5 mL, or less than about 2.0 mL). In some aspects, at least two of the four subcutaneous unit doses are administered to the subject at at least two different bodily locations. In some aspects, the first subcutaneous unit dose and the second subcutaneous unit dose are administered at a first bodily location, and the third subcutaneous unit dose and the fourth subcutaneous unit dose are administered at a second bodily location. In some aspects, the first subcutaneous unit dose is administered at a first bodily location, the second subcutaneous unit dose is administered at a second bodily location, the third subcutaneous unit dose is administered at a third bodily location, and the fourth subcutaneous unit dose is administered at a fourth bodily location.

[0150] In some aspects, the dose of the antibody, e.g., the anti-PD-1 antibody (e.g., nivolumab), is about 900 mg to about 1500 mg of the antibody administered about every four weeks. In some aspects, the dose of the antibody, e.g., the anti-PD-1 antibody (e.g., nivolumab), is about 900 mg to about 1450 mg, about 900 mg to about 1400 mg, about 900 mg to about 1350 mg, about 900 mg to about 1300 mg, about 900 mg to about 1250 mg, about 900 mg to about 1200 mg, about 950 mg to about 1500 mg, about 950 mg to about 1450 mg, about 950 mg to about 1400 mg, about 950 mg to about 1350 mg, about 950 mg to about 1300 mg, about 950 mg to about 1250 mg, about 950 mg to about 1200 mg, about 1000 mg to about 1500 mg, about 1000 mg to about 1450 mg, about 1000 mg to about 1400 mg, about 1000 mg to about 1350 mg, about 1000 mg to about 1300 mg, about 1000 mg to about 1250 mg, about 1000 mg to about 1200 mg, about 1050 to about 1500 mg, about 1050 to about 1450 mg, about 1050 to about 1400 mg, about 1050 mg to about 1350 mg, about 1050 mg to about 1300 mg, about 1050 mg to about 1250 mg, about 1050 mg to about 1200 mg, about 1100 mg to about 1500 mg, about 1100 mg to about 1450 mg, about 1100 mg to about 1400 mg, about 1100 mg to about 1350 mg, about 1100 mg to about 1300 mg, about 1100 mg to about 1250 mg, about 1100 mg to about 1200 mg, about 1150 mg to about 1500 mg, about 1150 mg to about 1450 mg, about 1150 mg to about 1400 mg, about 1150 mg to about 1350 mg, about 1150 mg to about 1300 mg, about 1150 mg to about 1250 mg, about 1150 mg to about 1200 mg, about 1200 mg to about 1500 mg, about 1200 mg to about 1450 mg, about 1200 mg to about 1400 mg, about 1200 mg to about 1350 mg, about 1200 mg to about 1300 mg, about 1200 mg to about 1250 mg, about 1175 mg to about 1225 mg, about 1175 mg to about 1200 mg, or about 1200 mg to about 1225 mg of the antibody administered about every four weeks. In some aspects, the dose of the antibody, e.g., the anti-PD-1 antibody (e.g., nivolumab), is about 1000 mg to about 1400 mg of the antibody administered about every four weeks. In some aspects, the dose of the antibody, e.g., the anti-PD-1 antibody (e.g., nivolumab), is about 1100 mg to about 1300 mg of the antibody administered about every four weeks. In some aspects, the dose of the antibody, e.g., the anti-PD-1 antibody, is about 1150 mg to about 1250 mg of the antibody administered about every four weeks. In some aspects, the dose of the antibody, e.g., the anti-PD-1 antibody (e.g., nivolumab), is about 1175 mg to about 1225 mg of the antibody administered about every four weeks.

[0151] In some aspects, the dose of the antibody is about 900 mg, about 950 mg, about 1000 mg, about 1010 mg, about 1020 mg, about 1030 mg, about 1040 mg, about 1050 mg, about 1060 mg, about 1070 mg, about 1080 mg, about 1090 mg, about 1100 mg, about 1110 mg, about 1120 mg, about 1130 mg, about 1140 mg, about 1150 mg, about 1160 mg, about 1170 mg, about 1180 mg, about 1190 mg, about 1200 mg, about 1210 mg, about 1220 mg, about 1230 mg, about 1240 mg, about 1250 mg, about 1260 mg, about 1270 mg, about 1280 mg, about 1290 mg, about 1300 mg, about 1310 mg, about 1320 mg, about 1330 mg, about 1340 mg, about 1350 mg, about 1360 mg, about 1370 mg, about 1380 mg, about 1390 mg, about 1400 mg, about 1410 mg, about 1420 mg, about 1430 mg, about 1440 mg, about 1450 mg, about 1460 mg, about 1470 mg, about 1480 mg, about 1490 mg, or about 1500 mg administered about every four weeks. In some aspects, the dose of the antibody is about 1100 mg administered about every four weeks. In some aspects, the dose of the antibody is about 1150 mg administered about every four weeks. In some aspects, the dose of the antibody is about 1175 mg administered about every four weeks. In some aspects, the dose of the antibody is about 1200 mg administered about every four weeks. In some aspects, the dose of the antibody is about 1225 mg administered about every four weeks. In some aspects, the dose of the antibody is about 1250 mg administered about every four weeks. In some aspects, the dose of the antibody is about 1300 mg administered about every four weeks.

[0152] In some aspects, the dose of the antibody comprises a single subcutaneous unit dose of about 1200 mg. In some aspects, the dose of the antibody comprises a single subcutaneous unit dose of about 1200 mg in a total administered volume of about 2 mL. In some aspects, the dose of the antibody comprises a single subcutaneous unit dose of about 1200 mg in a total administered volume of greater than about 2 mL. In some aspects, the dose of the antibody comprises a single subcutaneous unit dose of about 1200 mg in a total administered volume of greater than about 5 mL.

[0153] In some aspects, the dose of the antibody comprises a single subcutaneous unit dose of about 1200 mg in a total administered volume of less than about 5 mL (e.g., less than about 4.5 mL, less than about 4.0 mL, less than about 3.5 mL, less than about 3.0 mL, less than about 2.5 mL, or less than about 2.0 mL).

[0154] In some aspects, the dose of the antibody comprises two, three, four, six, or at least eight subcutaneous unit doses. In some aspects, the dose of the antibody comprises two subcutaneous unit doses, wherein each of the two subcutaneous unit doses comprises about 600 mg of the antibody. In some aspects, at least one of the two subcutaneous unit doses comprises about 600 mg of the antibody in a total volume of about 2 mL. In some aspects, at least one of the two subcutaneous unit doses comprises about 600 mg of the antibody in a total volume of greater than about 2 mL. In some aspects, at least one of the two subcutaneous unit doses comprises about 600 mg of the antibody in a total volume of greater than about 5 mL. In some aspects, at least one of the two subcutaneous unit doses comprises about 600 mg of the antibody in a total volume of less than about 5 mL (e.g., less than about 4.5 mL, less than about 4.0 mL, less than about 3.5 mL, less than about 3.0 mL, less than about 2.5 mL, or less than about 2.0 mL). In certain aspects, at least one of the two subcutaneous unit doses comprises about 600 mg of the antibody in a total volume of less than about 2 mL. In some aspects, the two subcutaneous unit doses are administered to the subject at a single bodily location. In some aspects, the two subcutaneous unit doses are administered to the subject at two different bodily locations.

[0155] In some aspects, the dose of about 1200 mg of the antibody comprises three subcutaneous unit doses. In some aspects, at least one of the three subcutaneous unit doses comprises about 400 mg of the antibody. In some aspects, each of the three subcutaneous unit doses comprises about 400 mg of the antibody. In some aspects, at least one of the three subcutaneous unit doses comprises about 400 mg of the antibody in a total volume of about 2 mL. In some aspects, at least one of the three subcutaneous unit doses comprises about 400 mg of the antibody in a total volume of greater than about 2 mL. In some aspects, at least one of the three subcutaneous unit doses comprises about 400 mg of the antibody in a total volume of greater than about 5 mL. In some aspects, at least one of the three subcutaneous unit doses comprises about 400 mg of the antibody in a total volume of about 5 mL (e.g., less than about 4.5 mL, less than about 4.0 mL, less than about 3.5 mL, less than about 3.0 mL, less than about 2.5 mL, or less than about 2.0 mL). In some aspects, at least two of the three subcutaneous unit doses are administered to the subject at at least two different bodily locations. In some aspects, the first subcutaneous unit dose and the second subcutaneous unit dose are administered at a first bodily location, and the third subcutaneous unit dose is administered at a second bodily location. In some aspects, the first subcutaneous unit dose is administered at a first bodily location, the second subcutaneous unit dose is administered at a second bodily location, and the third subcutaneous unit dose is administered at a third bodily location.

[0156] In some aspects, the dose of about 1200 mg of the antibody comprises four subcutaneous unit doses. In some aspects, at least one of the four subcutaneous unit doses comprises about 300 mg of the antibody. In some aspects, at least one of the four subcutaneous unit doses comprises about 300 mg of the antibody in a total volume of about 2 mL. In some aspects, at least one of the four subcutaneous unit doses comprises about 300 mg of the antibody in a total volume of greater than about 2 mL. In some aspects, at least one of the four subcutaneous unit doses comprises about 300 mg of the antibody in a total volume of greater than about 5 mL. In some aspects, at least one of the four subcutaneous unit doses comprises about 300 mg of the antibody in a total volume of about 5 mL (e.g., less than about 4.5 mL, less than about 4.0 mL, less than about 3.5 mL, less than about 3.0 mL, less than about 2.5 mL, or less than about 2.0 mL). In some aspects, at least two of the four subcutaneous unit doses are administered to the subject at at least two different bodily locations. In some aspects, the first subcutaneous unit dose and the second subcutaneous unit dose are administered at a first bodily location, and the third subcutaneous unit dose and the fourth subcutaneous unit dose are administered at a second bodily location. In some aspects, the first subcutaneous unit dose is administered at a first bodily location, the second subcutaneous unit dose is administered at a second bodily location, the third subcutaneous unit dose is administered at a third bodily location, and the fourth subcutaneous unit dose is administered at a fourth bodily location.

[0157] In some aspects, the dose of about 1200 mg of the antibody comprises six subcutaneous unit doses. In some aspects, at least one of the six subcutaneous unit doses comprises about 200 mg of the antibody. In some aspects, at least one of the six subcutaneous unit doses comprises about 200 mg of the antibody in a total volume of about 2 mL. In some aspects, at least one of the six subcutaneous unit doses comprises about 200 mg of the antibody in a total volume of greater than about 2 mL. In some aspects, at least one of the six subcutaneous unit doses comprises about 200 mg of the antibody in a total volume of greater than about 5 mL. In some aspects, at least one of the six subcutaneous unit doses comprises about 200 mg of the antibody in a total volume of about 5 mL (e.g., less than about 4.5 mL, less than about 4.0 mL, less than about 3.5 mL, less than about 3.0 mL, less than about 2.5 mL, or less than about 2.0 mL). In some aspects, at least two of the six subcutaneous unit doses are administered to the subject at at least two different bodily locations. In some aspects, the first subcutaneous unit dose and the second subcutaneous unit dose are administered at a first bodily location, the third subcutaneous unit dose and the fourth subcutaneous unit dose are administered at a second bodily location, and the fifth subcutaneous unit dose and the sixth subcutaneous unit dose are administered at a third bodily location. In some aspects, the first subcutaneous unit dose is administered at a first bodily location, the second subcutaneous unit dose is administered at a second bodily location, the third subcutaneous unit dose is administered at a third bodily location, the fourth subcutaneous unit dose is administered at a fourth bodily location, the fifth subcutaneous unit dose is administered at a fifth bodily location, and the sixth subcutaneous unit dose is administered at a sixth bodily location.

[0158] In some aspects, the dose of about 1200 mg of the antibody comprises at least eight subcutaneous unit doses. In some aspects, at least one of the eight subcutaneous unit doses comprises about 150 mg of the antibody. In some aspects, at least one of the eight subcutaneous unit doses comprises about 150 mg of the antibody in a total volume of about 2 mL. In some aspects, at least one of the eight subcutaneous unit doses comprises about 150 mg of the antibody in a total volume of greater than about 2 mL. In some aspects, at least one of the eight subcutaneous unit doses comprises about 150 mg of the antibody in a total volume of greater than about 5 mL. In some aspects, at least one of the eight subcutaneous unit doses comprises about 150 mg of the antibody in a total volume of about 5 mL (e.g., less than about 4.5 mL, less than about 4.0 mL, less than about 3.5 mL, less than about 3.0 mL, less than about 2.5 mL, or less than about 2.0 mL). In some aspects, at least two of the eight subcutaneous unit doses are administered to the subject at at least two different bodily locations. In some aspects, the first subcutaneous unit dose and the second subcutaneous unit dose are administered at a first bodily location, the third subcutaneous unit dose and the fourth subcutaneous unit dose are administered at a second bodily location, the fifth subcutaneous unit dose and the sixth subcutaneous unit dose are administered at a third bodily location, and the seventh subcutaneous unit dose and the eighth subcutaneous unit dose are administered at a fourth bodily location.

[0159] In some aspects, the dose of the antibody, e.g., the anti-PD-1 antibody (e.g., nivolumab), is about 1800 mg to about 3000 mg of the antibody administered about every eight weeks. In some aspects, the dose of the antibody, e.g., the anti-PD-1 antibody (e.g., nivolumab), is about 1800 mg to about 3000 mg of the antibody administered about every eight weeks. In some aspects, the dose of the antibody is about 1900 mg, about 1950 mg, about 2000 mg, about 2010 mg, about 2020 mg, about 2030 mg, about 2040 mg, about 2050 mg, about 2060 mg, about 2070 mg, about 2080 mg, about 2090 mg, about 2100 mg, about 2110 mg, about 2120 mg, about 2130 mg, about 2140 mg, about 2150 mg, about 2160 mg, about 2170 mg, about 2180 mg, about 2190 mg, about 2200 mg, about 2210 mg, about 2220 mg, about 2230 mg, about 2240 mg, about 2250 mg, about 2260 mg, about 2270 mg, about 2280 mg, about 2290 mg, about 2300 mg, about 2310 mg, about 2320 mg, about 2330 mg, about 2340 mg, about 2350 mg, about 2360 mg, about 2370 mg, about 2380 mg, about 2390 mg, about 2400 mg, about 2410 mg, about 2420 mg, about 2430 mg, about 2440 mg, about 2450 mg, about 2460 mg, about 2470 mg, about 2480 mg, about 2490 mg, about 2500 mg, about 2510 mg, about 2520 mg, about 2530 mg, about 2540 mg, about 2550 mg, about 2560 mg, about 2570 mg, about 2580 mg, about 2590 mg, or about 2600 mg administered about every four weeks. In some aspects, the dose of the antibody is about 2300 mg administered about every four weeks. In some aspects, the dose of the antibody is about 2350 mg administered about every four weeks. In some aspects, the dose of the antibody is about 2375 mg administered about every four weeks. In some aspects, the dose of the antibody is about 2400 mg administered about every four weeks. In some aspects, the dose of the antibody is about 2425 mg administered about every four weeks. In some aspects, the dose of the antibody is about 2450 mg administered about every four weeks. In some aspects, the dose of the antibody is about 2475 mg administered about every four weeks. In some aspects, the dose of the antibody is about 2500 mg administered about every four weeks.

[0160] In some aspects, the dose of the antibody comprises a single subcutaneous unit dose of about 2400 mg. In some aspects, the dose of the antibody comprises a single subcutaneous unit dose of about 2400 mg in a total administered volume of greater than about 5 mL. In some aspects, the dose of the antibody comprises a single subcutaneous unit dose of about 2400 mg in a total administered volume of about 5 mL. In some aspects, the dose of the antibody comprises a single subcutaneous unit dose of about 2400 mg in a total administered volume of less than about 5 mL (e.g., less than about 4.5 mL, less than about 4.0 mL, less than about 3.5 mL, less than about 3.0 mL, less than about 2.5 mL, or less than about 2.0 mL).

[0161] In some aspects, the dose of about 2400 mg of the antibody comprises four subcutaneous unit doses. In some aspects, at least one of the four subcutaneous unit doses comprises about 600 mg of the antibody. In some aspects, at least one of the four subcutaneous unit doses comprises about 600 mg of the antibody in a total volume of about 2 mL. In some aspects, at least one of the four subcutaneous unit doses comprises about 600 mg of the antibody in a total volume of greater than about 2 mL. In some aspects, at least one of the four subcutaneous unit doses comprises about 600 mg of the antibody in a total volume of greater than about 5 mL. In some aspects, at least one of the four subcutaneous unit doses comprises about 600 mg of the antibody in a total volume of about 5 mL (e.g., less than about 4.5 mL, less than about 4.0 mL, less than about 3.5 mL, less than about 3.0 mL, less than about 2.5 mL, or less than about 2.0 mL). In some aspects, at least two of the four subcutaneous unit doses are administered to the subject at at least two different bodily locations. In some aspects, the first subcutaneous unit dose and the second subcutaneous unit dose are administered at a first bodily location, and the third subcutaneous unit dose and the fourth subcutaneous unit dose are administered at a second bodily location. In some aspects, the first subcutaneous unit dose is administered at a first bodily location, the second subcutaneous unit dose is administered at a second bodily location, the third subcutaneous unit dose is administered at a third bodily location, and the fourth subcutaneous unit dose is administered at a fourth bodily location.

[0162] In some aspects, the dose of about 2400 mg of the antibody comprises six subcutaneous unit doses. In some aspects, at least one of the six subcutaneous unit doses comprises about 400 mg of the antibody. In some aspects, at least one of the six subcutaneous unit doses comprises about 400 mg of the antibody in a total volume of about 2 mL. In some aspects, at least one of the six subcutaneous unit doses comprises about 400 mg of the antibody in a total volume of greater than about 2 mL. In some aspects, at least one of the six subcutaneous unit doses comprises about 400 mg of the antibody in a total volume of greater than about 5 mL. In some aspects, at least one of the six subcutaneous unit doses comprises about 400 mg of the antibody in a total volume of about 5 mL (e.g., less than about 4.5 mL, less than about 4.0 mL, less than about 3.5 mL, less than about 3.0 mL, less than about 2.5 mL, or less than about 2.0 mL). In some aspects, at least two of the six subcutaneous unit doses are administered to the subject at at least two different bodily locations. In some aspects, the first subcutaneous unit dose and the second subcutaneous unit dose are administered at a first bodily location, the third subcutaneous unit dose and the fourth subcutaneous unit dose are administered at a second bodily location, and the fifth subcutaneous unit dose and the sixth subcutaneous unit dose are administered at a third bodily location. In some aspects, the first subcutaneous unit dose is administered at a first bodily location, the second subcutaneous unit dose is administered at a second bodily location, the third subcutaneous unit dose is administered at a third bodily location, the fourth subcutaneous unit dose is administered at a fourth bodily location, the fifth subcutaneous unit dose is administered at a fifth bodily location, and the sixth subcutaneous unit dose is administered at a sixth bodily location.

[0163] In some aspects, the dose of about 2400 mg of the antibody comprises at least eight subcutaneous unit doses. In some aspects, at least one of the eight subcutaneous unit doses comprises about 300 mg of the antibody. In some aspects, at least one of the eight subcutaneous unit doses comprises about 300 mg of the antibody in a total volume of about 2 mL. In some aspects, at least one of the eight subcutaneous unit doses comprises about 300 mg of the antibody in a total volume of greater than about 2 mL. In some aspects, at least one of the eight subcutaneous unit doses comprises about 300 mg of the antibody in a total volume of greater than about 5 mL. In some aspects, at least one of the eight subcutaneous unit doses comprises about 300 mg of the antibody in a total volume of about 5 mL (e.g., less than about 4.5 mL, less than about 4.0 mL, less than about 3.5 mL, less than about 3.0 mL, less than about 2.5 mL, or less than about 2.0 mL). In some aspects, at least two of the eight subcutaneous unit doses are administered to the subject at at least two different bodily locations. In some aspects, the first subcutaneous unit dose and the second subcutaneous unit dose are administered at a first bodily location, the third subcutaneous unit dose and the fourth subcutaneous unit dose are administered at a second bodily location, the fifth subcutaneous unit dose and the sixth subcutaneous unit dose are administered at a third bodily location, and the seventh subcutaneous unit dose and the eighth subcutaneous unit dose are administered at a fourth bodily location.

[0164] In some aspects, the anti-PD-1 antibody comprises pembrolizumab, which is administered subcutaneously once about every week, once about every two weeks, once about every three weeks, or once about every four weeks. In some aspects, about 100 mg to about 300 mg pembrolizumab is administered subcutaneously once about every two weeks. In some aspects, about 100 mg, about 110 mg, about 120 mg, about 130 mg, about 140 mg, about 150 mg, about 160 mg, about 170 mg, about 180 mg, about 190 mg, about 200 mg, about 210 mg, about 220 mg, about 230 mg, about 240 mg, about 250 mg, about 260 mg, about 270 mg, about 280 mg, about 290 mg, or about 300 mg pembrolizumab is administered subcutaneously once about every two weeks. In some aspects, at least about 150 mg pembrolizumab is administered subcutaneously once about every two weeks. In some aspects, at least about 200 mg pembrolizumab is administered subcutaneously once about every two weeks. In some aspects, at least about 300 mg pembrolizumab is administered subcutaneously once about every four weeks. In some aspects, at least about 400 mg pembrolizumab is administered subcutaneously once about every four weeks. In some aspects, the dose of pembrolizumab is administered in a volume of at least about 2 mL to at least about 4 mL.

[0165] In some aspects, the anti-PD-1 antibody comprises sasanlimab, which is administered subcutaneously once about every week, once about every two weeks, once about every three weeks, or once about every four weeks. In some aspects, about 200 mg to about 400 mg sasanlimab is administered subcutaneously once about every four weeks. In some aspects, about 200 mg, about 210 mg, about 220 mg, about 230 mg, about 240 mg, about 250 mg, about 260 mg, about 270 mg, about 280 mg, about 290 mg, about 300 mg, about 310 mg, about 320 mg, about 330 mg, about 340 mg, about 350 mg, about 360 mg, about 370 mg, about 380 mg, about 390 mg, or about 400 mg sasanlimab is administered subcutaneously once about every four weeks. In some aspects, at least about 250 mg sasanlimab is administered subcutaneously once about every four weeks. In some aspects, at least about 200 mg sasanlimab is administered subcutaneously once about every four weeks. In some aspects, at least about 250 mg sasanlimab is administered subcutaneously once about every four weeks. In some aspects, at least about 300 mg sasanlimab is administered subcutaneously once about every four weeks. In some aspects, the dose of sasanlimab is administered in a volume of at least about 2 mL in a single injection. In some aspects, the dose of sasanlimab is administered in a volume of at least about 6 mL in at least three injections.

[0166] In some aspects, the anti-PD-1 antibody comprises KN035, which is administered subcutaneously once about every week, once about every two weeks, once about every three weeks, or once about every four weeks. In some aspects, about 100 mg to about 200 mg KN035 is administered subcutaneously once about every week. In some aspects, about 100 mg, about 110 mg, about 120 mg, about 130 mg, about 140 mg, about 150 mg, about 160 mg, about 170 mg, about 180 mg, about 190 mg, or about 200 mg KN035 is administered subcutaneously once about every week. In some aspects, at least about 150 mg KN035 is administered subcutaneously once about every week. In some aspects, about 2.5 mg/kg KN035 is administered subcutaneously once about every week. In some aspects, about 200 mg to about 400 mg KN035 is administered subcutaneously once about every three weeks. In some aspects, about 200 mg, about 210 mg, about 220 mg, about 230 mg, about 240 mg, about 250 mg, about 260 mg, about 270 mg, about 280 mg, about 290 mg, about 300 mg, about 310 mg, about 320 mg, about 330 mg, about 340 mg, about 350 mg, about 360 mg, about 370 mg, about 380 mg, about 390 mg, or about 400 mg KN035 is administered subcutaneously once about every three weeks. In some aspects, at least about 300 mg KN035 is administered subcutaneously once about every three weeks. In some aspects, at least about 300 mg KN035 is administered subcutaneously once about every four weeks. In some aspects, at least about 400 mg KN035 is administered subcutaneously once about every four weeks. In some aspects, the dose of KN035 is administered in a volume of less than about 1 mL.

[0167] II.A.2. Anti-PD-L1 Antibody Dosing

[0168] In some aspects of the present disclosure, the antibody comprises an anti-PD-L1 antibody. Any anti-PD-L1 antibody known in the art and/or disclosed herein can be used in the methods disclosed herein. In certain aspects, the anti-PD-L1 antibody comprises atezolizumab. In certain aspects, the anti-PD-L1 antibody comprises durvalumab. In certain aspects, the anti-PD-L 1 antibody comprises avelumab.

[0169] In some aspects, the dose of the antibody, e.g., the anti-PD-L1 antibody, is about 300 mg to about 900 mg of the antibody administered about every week. In some aspects, the dose of the antibody, e.g., the anti-PD-L1 antibody, is about 300 mg to about 850 mg, about 300 mg to about 800 mg, about 300 mg to about 750 mg, about 300 mg to about 700 mg, about 300 mg to about 650 mg, about 300 mg to about 600 mg, about 350 mg to about 900 mg, about 350 mg to about 850 mg, about 350 mg to about 800 mg, about 350 mg to about 750 mg, about 350 mg to about 700 mg, about 350 mg to about 650 mg, about 350 mg to about 600 mg, about 400 mg to about 900 mg, about 400 mg to about 850 mg, about 400 mg to about 800 mg, about 400 mg to about 750 mg, about 400 mg to about 700 mg, about 400 mg to about 650 mg, about 400 mg to about 600 mg, about 450 to about 900 mg, about 450 to about 850 mg, about 450 to about 800 mg, about 450 mg to about 750 mg, about 450 mg to about 700 mg, about 450 mg to about 650 mg, about 450 mg to about 600 mg, about 500 mg to about 900 mg, about 500 mg to about 850 mg, about 500 mg to about 800 mg, about 500 mg to about 700 mg, about 500 mg to about 650 mg, about 500 mg to about 600 mg, about 550 mg to about 900 mg, about 550 mg to about 850 mg, about 550 mg to about 800 mg, about 550 mg to about 750 mg, about 550 mg to about 700 mg, about 550 mg to about 650 mg, about 550 mg to about 600 mg, about 600 mg to about 900 mg, about 600 mg to about 850 mg, about 600 mg to about 800 mg, about 600 mg to about 750 mg, about 600 mg to about 700 mg, about 600 mg to about 650 mg, about 575 mg to about 625 mg, about 575 mg to about 600 mg, or about 600 mg to about 625 mg of the antibody administered about every week. In some aspects, the dose of the antibody, e.g., the anti-PD-L1 antibody, is about 400 mg to about 800 mg of the antibody administered about every week. In some aspects, the dose of the antibody, e.g., the anti-PD-L1 antibody, is about 500 mg to about 700 mg of the antibody administered about every week. In some aspects, the dose of the antibody, e.g., the anti-PD-L1 antibody, is about 550 mg to about 650 mg of the antibody administered about every week. In some aspects, the dose of the antibody, e.g., the anti-PD-L1 antibody, is about 575 mg to about 625 mg of the antibody administered about every week.

[0170] In some aspects, the dose of the antibody is about 300 mg, about 350 mg, about 400 mg, about 450 mg, about 500 mg, about 510 mg, about 520 mg, about 530 mg, about 540 mg, about 550 mg, about 560 mg, about 570 mg, about 580 mg, about 590 mg, about 600 mg, about 610 mg, about 620 mg, about 630 mg, about 640 mg, about 650 mg, about 660 mg, about 670 mg, about 680 mg, about 690 mg, about 700 mg, about 710 mg, about 720 mg, about 730 mg, about 740 mg, about 750 mg, about 760 mg, about 770 mg, about 780 mg, about 790 mg, about 800 mg, about 810 mg, about 820 mg, about 830 mg, about 840 mg, about 850 mg, about 860 mg, about 870 mg, about 880 mg, about 890 mg, or about 900 mg administered about every week. In some aspects, the dose of the antibody is about 500 mg administered about every week. In some aspects, the dose of the antibody is about 550 mg administered about every week. In some aspects, the dose of the antibody is about 575 mg administered about every week. In some aspects, the dose of the antibody is about 600 mg administered about every week. In some aspects, the dose of the antibody is about 625 mg administered about every week. In some aspects, the dose of the antibody is about 650 mg administered about every week. In some aspects, the dose of the antibody is about 700 mg administered about every week.

[0171] In some aspects, the dose of the antibody comprises a single subcutaneous unit dose of about 600 mg. In some aspects, the dose of the antibody comprises a single subcutaneous unit dose of about 600 mg in a total administered volume of less than about 5 mL (e.g., less than about 4.5 mL, less than about 4.0 mL, less than about 3.5 mL, less than about 3.0 mL, less than about 2.5 mL, or less than about 2.0 mL). In some aspects, the dose of the antibody comprises a single subcutaneous unit dose of about 600 mg in a total administered volume of about 2 mL. In some aspects, the dose of the antibody comprises a single subcutaneous unit dose of about 600 mg in a total administered volume of about 5 mL. In some aspects, the dose of the antibody comprises a single subcutaneous unit dose of about 600 mg in a total administered volume of greater than about 5 mL.

[0172] In some aspects, the dose of the antibody comprises two subcutaneous unit doses, wherein each of the two subcutaneous unit doses comprises about 300 mg of the antibody. In some aspects, at least one of the two subcutaneous unit doses comprises about 300 mg of the antibody in a total volume of about 2 mL. In some aspects, at least one of the two subcutaneous unit doses comprises about 300 mg of the antibody in a total volume of greater than about 2 mL. In some aspects, at least one of the two subcutaneous unit doses comprises about 300 mg of the antibody in a total volume of greater than about 5 mL. In some aspects, at least one of the two subcutaneous unit doses comprises about 300 mg of the antibody in a total volume of less than about 5 mL (e.g., less than about 4.5 mL, less than about 4.0 mL, less than about 3.5 mL, less than about 3.0 mL, less than about 2.5 mL, or less than about 2.0 mL). In certain aspects, at least one of the two subcutaneous unit doses comprises about 300 mg of the antibody in a total volume of less than about 2 mL. In some aspects, the two subcutaneous unit doses are administered to the subject at a single bodily location. In some aspects, the two subcutaneous unit doses are administered to the subject at two different bodily locations.

[0173] In some aspects, the dose of about 600 mg of the antibody comprises three subcutaneous unit doses. In some aspects, at least one of the three subcutaneous unit doses comprises about 200 mg of the antibody. In some aspects, each of the three subcutaneous unit doses comprises about 200 mg of the antibody. In some aspects, at least one of the three subcutaneous unit doses comprises about 200 mg of the antibody in a total volume of about 2 mL. In some aspects, at least one of the three subcutaneous unit doses comprises about 200 mg of the antibody in a total volume of greater than about 2 mL. In some aspects, at least one of the three subcutaneous unit doses comprises about 200 mg of the antibody in a total volume of greater than about 5 mL. In some aspects, at least one of the three subcutaneous unit doses comprises about 200 mg of the antibody in a total volume of about 5 mL (e.g., less than about 4.5 mL, less than about 4.0 mL, less than about 3.5 mL, less than about 3.0 mL, less than about 2.5 mL, or less than about 2.0 mL). In some aspects, at least two of the three subcutaneous unit doses are administered to the subject at least two different bodily locations. In some aspects, the first subcutaneous unit dose and the second subcutaneous unit dose are administered at a first bodily location, and the third subcutaneous unit dose is administered at a second bodily location. In some aspects, the first subcutaneous unit dose is administered at a first bodily location, the second subcutaneous unit dose is administered at a second bodily location, and the third subcutaneous unit dose is administered at a third bodily location.

[0174] In some aspects, the dose of about 600 mg of the antibody comprises at least four subcutaneous unit doses. In some aspects, at least one of the four subcutaneous unit doses comprises about 150 mg of the antibody. In some aspects, at least one of the four subcutaneous unit doses comprises about 150 mg of the antibody in a total volume of about 2 mL. In some aspects, at least one of the four subcutaneous unit doses comprises about 150 mg of the antibody in a total volume of greater than about 2 mL. In some aspects, at least one of the four subcutaneous unit doses comprises about 150 mg of the antibody in a total volume of greater than about 5 mL. In some aspects, at least one of the four subcutaneous unit doses comprises about 150 mg of the antibody in a total volume of about 5 mL (e.g., less than about 4.5 mL, less than about 4.0 mL, less than about 3.5 mL, less than about 3.0 mL, less than about 2.5 mL, or less than about 2.0 mL). In some aspects, at least two of the four subcutaneous unit doses are administered to the subject at at least two different bodily locations. In some aspects, the first subcutaneous unit dose and the second subcutaneous unit dose are administered at a first bodily location, and the third subcutaneous unit dose and the fourth subcutaneous unit dose are administered at a second bodily location. In some aspects, the first subcutaneous unit dose is administered at a first bodily location, the second subcutaneous unit dose is administered at a second bodily location, the third subcutaneous unit dose is administered at a third bodily location, and the fourth subcutaneous unit dose is administered at a fourth bodily location.

[0175] In some aspects, the dose of the antibody, e.g., the anti-PD-L1 antibody, is about 900 mg to about 1800 mg of the antibody administered about every two weeks. In some aspects, the dose of the antibody, e.g., the anti-PD-L1 antibody, is about 900 mg to about 1750 mg, about 900 mg to about 1700 mg, about 900 mg to about 1650 mg, about 900 mg to about 1600 mg, about 900 mg to about 1550 mg, about 900 mg to about 1500 mg, about 900 mg to about 1450 mg, about 900 mg to about 1400 mg, about 900 mg to about 1350 mg, about 900 mg to about 1300 mg, about 900 mg to about 1250 mg, about 900 mg to about 1200 mg, about 950 mg to about 1500 mg, about 950 mg to about 1450 mg, about 950 mg to about 1400 mg, about 950 mg to about 1350 mg, about 950 mg to about 1300 mg, about 950 mg to about 1250 mg, about 950 mg to about 1200 mg, about 1000 mg to about 1500 mg, about 1000 mg to about 1450 mg, about 1000 mg to about 1400 mg, about 1000 mg to about 1350 mg, about 1000 mg to about 1300 mg, about 1000 mg to about 1250 mg, about 1000 mg to about 1200 mg, about 1050 to about 1500 mg, about 1050 to about 1450 mg, about 1050 to about 1400 mg, about 1050 mg to about 1350 mg, about 1050 mg to about 1300 mg, about 1050 mg to about 1250 mg, about 1050 mg to about 1200 mg, about 1100 mg to about 1500 mg, about 1100 mg to about 1450 mg, about 1100 mg to about 1400 mg, about 1100 mg to about 1350 mg, about 1100 mg to about 1300 mg, about 1100 mg to about 1250 mg, about 1100 mg to about 1200 mg, about 1150 mg to about 1500 mg, about 1150 mg to about 1450 mg, about 1150 mg to about 1400 mg, about 1150 mg to about 1350 mg, about 1150 mg to about 1300 mg, about 1150 mg to about 1250 mg, about 1150 mg to about 1200 mg, about 1200 mg to about 1500 mg, about 1200 mg to about 1450 mg, about 1200 mg to about 1400 mg, about 1200 mg to about 1350 mg, about 1200 mg to about 1300 mg, about 1200 mg to about 1250 mg, about 1175 mg to about 1225 mg, about 1175 mg to about 1200 mg, or about 1200 mg to about 1225 mg of the antibody administered about every two weeks. In some aspects, the dose of the antibody, e.g., the anti-PD-L1 antibody, is about 1000 mg to about 1400 mg of the antibody administered about every two weeks. In some aspects, the dose of the antibody, e.g., the anti-PD-L1 antibody, is about 1100 mg to about 1300 mg of the antibody administered about every two weeks. In some aspects, the dose of the antibody, e.g., the anti-PD-L1 antibody, is about 1150 mg to about 1250 mg of the antibody administered about every two weeks. In some aspects, the dose of the antibody, e.g., the anti-PD-L1 antibody, is about 1175 mg to about 1225 mg of the antibody administered about every two weeks.

[0176] In some aspects, the dose of the antibody is about 900 mg, about 950 mg, about 1000 mg, about 1010 mg, about 1020 mg, about 1030 mg, about 1040 mg, about 1050 mg, about 1060 mg, about 1070 mg, about 1080 mg, about 1090 mg, about 1100 mg, about 1110 mg, about 1120 mg, about 1130 mg, about 1140 mg, about 1150 mg, about 1160 mg, about 1170 mg, about 1180 mg, about 1190 mg, about 1200 mg, about 1210 mg, about 1220 mg, about 1230 mg, about 1240 mg, about 1250 mg, about 1260 mg, about 1270 mg, about 1280 mg, about 1290 mg, about 1300 mg, about 1310 mg, about 1320 mg, about 1330 mg, about 1340 mg, about 1350 mg, about 1360 mg, about 1370 mg, about 1380 mg, about 1390 mg, about 1400 mg, about 1410 mg, about 1420 mg, about 1430 mg, about 1440 mg, about 1450 mg, about 1460 mg, about 1470 mg, about 1480 mg, about 1490 mg, about 1500 mg, about 1550 mg, about 1600 mg, about 1650 mg, about 1700 mg, about 1750 mg, or about 1800 mg administered about every two weeks. In some aspects, the dose of the antibody is about 1100 mg administered about every two weeks. In some aspects, the dose of the antibody is about 1150 mg administered about every two weeks. In some aspects, the dose of the antibody is about 1175 mg administered about every two weeks. In some aspects, the dose of the antibody is about 1200 mg administered about every two weeks. In some aspects, the dose of the antibody is about 1225 mg administered about every two weeks. In some aspects, the dose of the antibody is about 1250 mg administered about every two weeks. In some aspects, the dose of the antibody is about 1300 mg administered about every two weeks.

[0177] In some aspects, the dose of the antibody comprises a single subcutaneous unit dose of about 1200 mg. In some aspects, the dose of the antibody comprises a single subcutaneous unit dose of about 1200 mg in a total administered volume of less than about 5 mL (e.g., less than about 4.5 mL, less than about 4.0 mL, less than about 3.5 mL, less than about 3.0 mL, less than about 2.5 mL, or less than about 2.0 mL). In some aspects, the dose of the antibody comprises a single subcutaneous unit dose of about 1200 mg in a total administered volume of about 2 mL. In some aspects, the dose of the antibody comprises a single subcutaneous unit dose of about 1200 mg in a total administered volume of about 5 mL. In some aspects, the dose of the antibody comprises a single subcutaneous unit dose of about 1200 mg in a total administered volume of greater than about 5 mL.

[0178] In some aspects, the dose of the antibody comprises two, three, four, six, or at least eight subcutaneous unit doses. In some aspects, the dose of the antibody comprises two subcutaneous unit doses, wherein each of the two subcutaneous unit doses comprises about 600 mg of the antibody. In some aspects, at least one of the two subcutaneous unit doses comprises about 600 mg of the antibody in a total volume of about 2 mL. In some aspects, at least one of the two subcutaneous unit doses comprises about 600 mg of the antibody in a total volume of greater than about 2 mL. In some aspects, at least one of the two subcutaneous unit doses comprises about 600 mg of the antibody in a total volume of greater than about 5 mL. In some aspects, at least one of the two subcutaneous unit doses comprises about 600 mg of the antibody in a total volume of less than about 5 mL (e.g., less than about 4.5 mL, less than about 4.0 mL, less than about 3.5 mL, less than about 3.0 mL, less than about 2.5 mL, or less than about 2.0 mL). In certain aspects, at least one of the two subcutaneous unit doses comprises about 600 mg of the antibody in a total volume of less than about 2 mL. In some aspects, the two subcutaneous unit doses are administered to the subject at a single bodily location. In some aspects, the two subcutaneous unit doses are administered to the subject at two different bodily locations.

[0179] In some aspects, the dose of about 1200 mg of the antibody comprises three subcutaneous unit doses. In some aspects, at least one of the three subcutaneous unit doses comprises about 400 mg of the antibody. In some aspects, each of the three subcutaneous unit doses comprises about 400 mg of the antibody. In some aspects, at least one of the three subcutaneous unit doses comprises about 400 mg of the antibody in a total volume of about 2 mL. In some aspects, at least one of the three subcutaneous unit doses comprises about 400 mg of the antibody in a total volume of greater than about 2 mL. In some aspects, at least one of the three subcutaneous unit doses comprises about 400 mg of the antibody in a total volume of greater than about 5 mL. In some aspects, at least one of the three subcutaneous unit doses comprises about 400 mg of the antibody in a total volume of about 5 mL (e.g., less than about 4.5 mL, less than about 4.0 mL, less than about 3.5 mL, less than about 3.0 mL, less than about 2.5 mL, or less than about 2.0 mL). In some aspects, at least two of the three subcutaneous unit doses are administered to the subject at least two different bodily locations. In some aspects, the first subcutaneous unit dose and the second subcutaneous unit dose are administered at a first bodily location, and the third subcutaneous unit dose is administered at a second bodily location. In some aspects, the first subcutaneous unit dose is administered at a first bodily location, the second subcutaneous unit dose is administered at a second bodily location, and the third subcutaneous unit dose is administered at a third bodily location.

[0180] In some aspects, the dose of about 1200 mg of the antibody comprises four subcutaneous unit doses. In some aspects, at least one of the four subcutaneous unit doses comprises about 300 mg of the antibody. In some aspects, at least one of the four subcutaneous unit doses comprises about 300 mg of the antibody in a total volume of about 2 mL. In some aspects, at least one of the four subcutaneous unit doses comprises about 300 mg of the antibody in a total volume of greater than about 2 mL. In some aspects, at least one of the four subcutaneous unit doses comprises about 300 mg of the antibody in a total volume of greater than about 5 mL. In some aspects, at least one of the four subcutaneous unit doses comprises about 300 mg of the antibody in a total volume of about 5 mL (e.g., less than about 4.5 mL, less than about 4.0 mL, less than about 3.5 mL, less than about 3.0 mL, less than about 2.5 mL, or less than about 2.0 mL). In some aspects, at least two of the four subcutaneous unit doses are administered to the subject at at least two different bodily locations. In some aspects, the first subcutaneous unit dose and the second subcutaneous unit dose are administered at a first bodily location, and the third subcutaneous unit dose and the fourth subcutaneous unit dose are administered at a second bodily location. In some aspects, the first subcutaneous unit dose is administered at a first bodily location, the second subcutaneous unit dose is administered at a second bodily location, the third subcutaneous unit dose is administered at a third bodily location, and the fourth subcutaneous unit dose is administered at a fourth bodily location.

[0181] In some aspects, the dose of about 1200 mg of the antibody comprises six subcutaneous unit doses. In some aspects, at least one of the six subcutaneous unit doses comprises about 200 mg of the antibody. In some aspects, at least one of the six subcutaneous unit doses comprises about 200 mg of the antibody in a total volume of about 2 mL. In some aspects, at least one of the six subcutaneous unit doses comprises about 200 mg of the antibody in a total volume of greater than about 2 mL. In some aspects, at least one of the six subcutaneous unit doses comprises about 200 mg of the antibody in a total volume of greater than about 5 mL. In some aspects, at least one of the six subcutaneous unit doses comprises about 200 mg of the antibody in a total volume of about 5 mL (e.g., less than about 4.5 mL, less than about 4.0 mL, less than about 3.5 mL, less than about 3.0 mL, less than about 2.5 mL, or less than about 2.0 mL). In some aspects, at least two of the six subcutaneous unit doses are administered to the subject at least two different bodily locations. In some aspects, the first subcutaneous unit dose and the second subcutaneous unit dose are administered at a first bodily location, the third subcutaneous unit dose and the fourth subcutaneous unit dose are administered at a second bodily location, and the fifth subcutaneous unit dose and the sixth subcutaneous unit dose are administered at a third bodily location. In some aspects, the first subcutaneous unit dose is administered at a first bodily location, the second subcutaneous unit dose is administered at a second bodily location, the third subcutaneous unit dose is administered at a third bodily location, the fourth subcutaneous unit dose is administered at a fourth bodily location, the fifth subcutaneous unit dose is administered at a fifth bodily location, and the sixth subcutaneous unit dose is administered at a sixth bodily location.

[0182] In some aspects, the dose of about 1200 mg of the antibody comprises at least eight subcutaneous unit doses. In some aspects, at least one of the eight subcutaneous unit doses comprises about 150 mg of the antibody. In some aspects, at least one of the eight subcutaneous unit doses comprises about 150 mg of the antibody in a total volume of about 2 mL. In some aspects, at least one of the eight subcutaneous unit doses comprises about 150 mg of the antibody in a total volume of greater than about 2 mL. In some aspects, at least one of the eight subcutaneous unit doses comprises about 150 mg of the antibody in a total volume of greater than about 5 mL. In some aspects, at least one of the eight subcutaneous unit doses comprises about 150 mg of the antibody in a total volume of about 5 mL (e.g., less than about 4.5 mL, less than about 4.0 mL, less than about 3.5 mL, less than about 3.0 mL, less than about 2.5 mL, or less than about 2.0 mL). In some aspects, at least two of the eight subcutaneous unit doses are administered to the subject at at least two different bodily locations. In some aspects, the first subcutaneous unit dose and the second subcutaneous unit dose are administered at a first bodily location, the third subcutaneous unit dose and the fourth subcutaneous unit dose are administered at a second bodily location, the fifth subcutaneous unit dose and the sixth subcutaneous unit dose are administered at a third bodily location, and the seventh subcutaneous unit dose and the eighth subcutaneous unit dose are administered at a fourth bodily location.

[0183] In some aspects, the two, three, four, six, or at least eight subcutaneous unit doses are administered on the same day.

[0184] In some aspects, the dose of the antibody, e.g., the anti-PD-L1 antibody, is about 2100 mg to about 2700 mg of the antibody administered about every four weeks. In some aspects, the dose of the antibody, e.g., the anti-PD-L1 antibody, is about 2100 mg to about 2650 mg, about 2100 mg to about 2600 mg, about 2100 mg to about 2550 mg, about 2100 mg to about 2500 mg, about 2100 mg to about 2450 mg, about 2100 mg to about 2400 mg, about 2200 mg to about 2700 mg, about 2200 mg to about 2650 mg, about 2200 mg to about 2600 mg, about 2200 mg to about 2550 mg, about 2200 mg to about 2500 mg, about 2200 mg to about 2450 mg, about 2200 mg to about 2400 mg, about 2300 mg to about 2700 mg, about 2300 mg to about 2650 mg, about 2300 mg to about 2600 mg, about 2300 mg to about 2550 mg, about 2300 mg to about 2500 mg, about 2300 mg to about 2450 mg, about 2300 mg to about 2400 mg, about 2350 mg to about mg, about 2350 mg to about 2700 mg, about 2350 mg to about 2650 mg, about 2350 mg to about 2600 mg, about 2350 mg to about 2550 mg, about 2350 mg to about 2500 mg, about 2350 mg to about 2450 mg, about 2350 mg to about 2400 mg, about 2400 mg to about 2700 mg, about 2400 mg to about 2650 mg, about 2400 mg to about 2600 mg, about 2400 mg to about 2550 mg, about 2400 mg to about 2500 mg, about 2400 mg to about 2450 mg, about 2400 mg to about 2425 mg, about 2375 mg to about 2425 mg, or about 2375 mg to about 2400 mg of the antibody administered about every four weeks. In some aspects, the dose of the antibody, e.g., the anti-PD-L1 antibody, is about 2200 mg to about 2600 mg of the antibody administered about every four weeks. In some aspects, the dose of the antibody, e.g., the anti-PD-L1 antibody, is about 2300 mg to about 2500 mg of the antibody administered about every four weeks. In some aspects, the dose of the antibody, e.g., the anti-PD-L1 antibody, is about 2350 mg to about 2450 mg of the antibody administered about every four weeks. In some aspects, the dose of the antibody, e.g., the anti-PD-L1 antibody, is about 2375 mg to about 2425 mg of the antibody administered about every four weeks.

[0185] In some aspects, the dose of the antibody is about 2100 mg, about 2150 mg, about 2200 mg, about 2250 mg, about 2300 mg, about 2350 mg, about 2400 mg, about 2450 mg, about 2500 mg, about 2550 mg, about 2600 mg, about 2650 mg, or about 2700 mg administered about every four weeks. In some aspects, the dose of the antibody is about 2300 mg administered about every four weeks. In some aspects, the dose of the antibody is about 2350 mg administered about every four weeks. In some aspects, the dose of the antibody is about 2400 mg administered about every four weeks. In some aspects, the dose of the antibody is about 2450 mg administered about every four weeks. In some aspects, the dose of the antibody is about 2500 mg administered about every four weeks.

[0186] In some aspects, the dose of the antibody comprises a single subcutaneous dose comprising about 2400 mg of the antibody. In some aspects, the single subcutaneous dose of the antibody comprises about 2400 mg of the antibody in a total volume of greater than about 2 mL. In some aspects, the single subcutaneous unit dose comprises about 2400 mg of the antibody in a total volume of greater than about 5 mL.

[0187] In some aspects, the dose of the antibody comprises two, three, four, six, or at least eight subcutaneous unit doses. In some aspects, the dose of the antibody comprises two subcutaneous unit doses, wherein each of the two subcutaneous unit doses comprises about 1200 mg of the antibody. In some aspects, at least one of the two subcutaneous unit doses comprises about 1200 mg of the antibody in a total volume of about 2 mL. In some aspects, at least one of the two subcutaneous unit doses comprises about 1200 mg of the antibody in a total volume of greater than about 2 mL. In some aspects, at least one of the two subcutaneous unit doses comprises about 1200 mg of the antibody in a total volume of greater than about 5 mL. In some aspects, at least one of the two subcutaneous unit doses comprises about 1200 mg of the antibody in a total volume of less than about 5 mL (e.g., less than about 4.5 mL, less than about 4.0 mL, less than about 3.5 mL, less than about 3.0 mL, less than about 2.5 mL, or less than about 2.0 mL). In certain aspects, at least one of the two subcutaneous unit doses comprises about 1200 mg of the antibody in a total volume of less than about 2 mL. In some aspects, the two subcutaneous unit doses are administered to the subject at a single bodily location. In some aspects, the two subcutaneous unit doses are administered to the subject at two different bodily locations.

[0188] In some aspects, the dose of about 2400 mg of the antibody comprises three subcutaneous unit doses. In some aspects, at least one of the three subcutaneous unit doses comprises about 800 mg of the antibody. In some aspects, each of the three subcutaneous unit doses comprises about 800 mg of the antibody. In some aspects, at least one of the three subcutaneous unit doses comprises about 800 mg of the antibody in a total volume of about 2 mL. In some aspects, at least one of the three subcutaneous unit doses comprises about 800 mg of the antibody in a total volume of greater than about 2 mL. In some aspects, at least one of the three subcutaneous unit doses comprises about 800 mg of the antibody in a total volume of greater than about 5 mL. In some aspects, at least one of the three subcutaneous unit doses comprises about 800 mg of the antibody in a total volume of about 5 mL (e.g., less than about 4.5 mL, less than about 4.0 mL, less than about 3.5 mL, less than about 3.0 mL, less than about 2.5 mL, or less than about 2.0 mL). In some aspects, at least two of the three subcutaneous unit doses are administered to the subject at at least two different bodily locations. In some aspects, the first subcutaneous unit dose and the second subcutaneous unit dose are administered at a first bodily location, and the third subcutaneous unit dose is administered at a second bodily location. In some aspects, the first subcutaneous unit dose is administered at a first bodily location, the second subcutaneous unit dose is administered at a second bodily location, and the third subcutaneous unit dose is administered at a third bodily location.

[0189] In some aspects, the dose of about 2400 mg of the antibody comprises four subcutaneous unit doses. In some aspects, at least one of the four subcutaneous unit doses comprises about 600 mg of the antibody. In some aspects, at least one of the four subcutaneous unit doses comprises about 600 mg of the antibody in a total volume of about 2 mL. In some aspects, at least one of the four subcutaneous unit doses comprises about 600 mg of the antibody in a total volume of greater than about 2 mL. In some aspects, at least one of the four subcutaneous unit doses comprises about 600 mg of the antibody in a total volume of greater than about 5 mL. In some aspects, at least one of the four subcutaneous unit doses comprises about 600 mg of the antibody in a total volume of about 5 mL (e.g., less than about 4.5 mL, less than about 4.0 mL, less than about 3.5 mL, less than about 3.0 mL, less than about 2.5 mL, or less than about 2.0 mL). In some aspects, at least two of the four subcutaneous unit doses are administered to the subject at at least two different bodily locations. In some aspects, the first subcutaneous unit dose and the second subcutaneous unit dose are administered at a first bodily location, and the third subcutaneous unit dose and the fourth subcutaneous unit dose are administered at a second bodily location. In some aspects, the first subcutaneous unit dose is administered at a first bodily location, the second subcutaneous unit dose is administered at a second bodily location, the third subcutaneous unit dose is administered at a third bodily location, and the fourth subcutaneous unit dose is administered at a fourth bodily location.

[0190] In some aspects, the dose of about 2400 mg of the antibody comprises six subcutaneous unit doses. In some aspects, at least one of the six subcutaneous unit doses comprises about 400 mg of the antibody. In some aspects, at least one of the six subcutaneous unit doses comprises about 400 mg of the antibody in a total volume of about 2 mL. In some aspects, at least one of the six subcutaneous unit doses comprises about 400 mg of the antibody in a total volume of greater than about 2 mL. In some aspects, at least one of the six subcutaneous unit doses comprises about 400 mg of the antibody in a total volume of greater than about 5 mL. In some aspects, at least one of the six subcutaneous unit doses comprises about 400 mg of the antibody in a total volume of about 5 mL (e.g., less than about 4.5 mL, less than about 4.0 mL, less than about 3.5 mL, less than about 3.0 mL, less than about 2.5 mL, or less than about 2.0 mL). In some aspects, at least two of the six subcutaneous unit doses are administered to the subject at at least two different bodily locations. In some aspects, the first subcutaneous unit dose and the second subcutaneous unit dose are administered at a first bodily location, the third subcutaneous unit dose and the fourth subcutaneous unit dose are administered at a second bodily location, and the fifth subcutaneous unit dose and the sixth subcutaneous unit dose are administered at a third bodily location. In some aspects, the first subcutaneous unit dose is administered at a first bodily location, the second subcutaneous unit dose is administered at a second bodily location, the third subcutaneous unit dose is administered at a third bodily location, the fourth subcutaneous unit dose is administered at a fourth bodily location, the fifth subcutaneous unit dose is administered at a fifth bodily location, and the sixth subcutaneous unit dose is administered at a sixth bodily location.

[0191] In some aspects, the dose of about 2400 mg of the antibody comprises at least eight subcutaneous unit doses. In some aspects, at least one of the eight subcutaneous unit doses comprises about 300 mg of the antibody. In some aspects, at least one of the eight subcutaneous unit doses comprises about 300 mg of the antibody in a total volume of about 2 mL. In some aspects, at least one of the eight subcutaneous unit doses comprises about 300 mg of the antibody in a total volume of greater than about 2 mL. In some aspects, at least one of the eight subcutaneous unit doses comprises about 300 mg of the antibody in a total volume of greater than about 5 mL. In some aspects, at least one of the eight subcutaneous unit doses comprises about 300 mg of the antibody in a total volume of about 5 mL (e.g., less than about 4.5 mL, less than about 4.0 mL, less than about 3.5 mL, less than about 3.0 mL, less than about 2.5 mL, or less than about 2.0 mL). In some aspects, at least two of the eight subcutaneous unit doses are administered to the subject at at least two different bodily locations. In some aspects, the first subcutaneous unit dose and the second subcutaneous unit dose are administered at a first bodily location, the third subcutaneous unit dose and the fourth subcutaneous unit dose are administered at a second bodily location, the fifth subcutaneous unit dose and the sixth subcutaneous unit dose are administered at a third bodily location, and the seventh subcutaneous unit dose and the eighth subcutaneous unit dose are administered at a fourth bodily location.

[0192] In some aspects, the two, three, four, six, or at least eight subcutaneous unit doses are administered on the same day.

[0193] In some aspects, the anti-PD-L1 antibody comprises atezolizumab, which is administered subcutaneously once about every week, once about every two weeks, once about every three weeks, or once about every four weeks. In some aspects, about 1000 mg to about 1400 mg atezolizumab is administered subcutaneously once about every two weeks. In some aspects, about 1100 mg, about 1110 mg, about 1120 mg, about 1130 mg, about 1140 mg, about 1150 mg, about 1160 mg, about 1170 mg, about 1180 mg, about 1190 mg, about 1200 mg, about 1210 mg, about 1220 mg, about 1230 mg, about 1240 mg, about 1250 mg, about 1260 mg, about 1270 mg, about 1280 mg, about 1290 mg, or about 1300 mg atezolizumab is administered subcutaneously once about every two weeks. In some aspects, at least about 1200 mg atezolizumab is administered subcutaneously once about every two weeks. In some aspects, about 1700 mg to about 1900 mg atezolizumab is administered subcutaneously once about every three weeks. In some aspects, about 1700 mg, about 1710 mg, about 1720 mg, about 1730 mg, about 1740 mg, about 1750 mg, about 1760 mg, about 1770 mg, about 1780 mg, about 1790 mg, about 1800 mg, about 1810 mg, about 1820 mg, about 1830 mg, about 1840 mg, about 1850 mg, about 1860 mg, about 1870 mg, about 1880 mg, about 1890 mg, or about 1900 mg atezolizumab is administered subcutaneously once about every three weeks. In some aspects, at least about 1800 mg atezolizumab is administered subcutaneously once about every three weeks. In some aspects, the dose of atezolizumab is administered in a volume of at least about 2 mL to at least about 20 mL.

[0194] II.A.3. Endoglycosidase Hydrolase Enzyme Dosing

[0195] In some aspects, the pharmaceutical composition comprises an endoglycosidase hydrolase enzyme. Any endoglycosidase hydrolase enzyme can be used in the pharmaceutical compositions disclosed herein. In some aspects, the endoglycosidase hydrolase enzyme cleaves hyaluronic acid at a hexosaminidic β (1-4) or (1-3) linkage. In some aspects, the endoglycosidase hydrolase enzyme comprises a catalytic domain of hyaluronidase PH-20 (HuPH20), HYAL1, HYAL2, HYAL3, HYAL4, or HYALPS1.

[0196] In some aspects, the endoglycosidase hydrolase enzyme comprises a hyaluronidase. In some aspects, the endoglycosidase hydrolase enzyme comprises a hyaluronidase selected from the group consisting of HuPH20, HYAL1, HYAL2, HYAL3, HYAL4, any variant, and any isoform thereof. In some aspects, the endoglycosidase hydrolase enzyme comprises rHuPH20 or a fragment thereof. In some aspects, the endoglycosidase hydrolase enzyme comprises an amino acid sequence having at least about 70%, at least about 75%, at least about 80%, at least about 85%, at least about 90%, at least about 95%, at least about 96%, at least about 97%, at least about 98%, at least about 99%, or about 100% sequence identity to amino acids 36-490 of SEQ ID NO: 1. In some aspects, the endoglycosidase hydrolase enzyme comprises the catalytic domain of rHuPH20 (UniProt ID No. P38567-1). In some aspects, the endoglycosidase hydrolase enzyme comprises the rHuPH20 mature peptide (amino acids 36-490 of SEQ ID NO: 1A).

TABLE 1A
Amino Acid Sequence of rHuPH20

MGVLKFKHIFFRSFVKSSGVSQIVFTFLLIPCCLTLN
FRAPPVIPNVPFLWAWNAPSEFCLGKFDEPLDMSLFS
FIGSPRINATGQGVTIFYVDRLGYYPYIDSITGVTVN
GGIPQKISLQDHLDKAKKDITFYMPVDNLGMAVIDWE
EWRPTWARNWKPKDVYKNRSIELVQQQNVQLSLTEAT
EKAKQEFEKAGKDFLVETIKLGKLLRPNHLWGYYLFP
DCYNHHYKKPGYNGSCFNVEIKRNDDLSWLWNESTAL
YPSIYLNTQQSPVAATLYVRNRVREAIRVSKIPDAKS
PLPVFAYTRIVFTDQVLKFLSQDELVYTFGETVALGA
SGIVIWGTLSIMRSMKSCLLLDNYMETILNPYIINVT
LAAKMCSQVLCQEQGVCIRKNWNSSDYLHLNPDNFAI
QLEKGGKFTVRGKPTLEDLEQFSEKFYCSCYSTLSCK
EKADVKDTDAVDVCIADGVCIDAFLKPPMETEEPQIF
YNASPSTLSATMFIVSILFLIISSVASL
(SEQ ID NO: 1)

Signal peptide: underlined; mature protein: bold; propeptide: italics.

[0197] In some aspects, the subcutaneous injection is based on Halozyme Therapeutics' ENHANZE® drug-delivery technology (see U.S. Pat. No. 7,767,429, which is incorporated by reference herein in its entirety). ENHANZE® uses a co-formulation of an antibody with recombinant human hyaluronidase enzyme (rHuPH20), which removes traditional limitations on the volume of biologics and drugs that can be delivered subcutaneously due to the extracellular matrix (see U.S. Pat. No. 7,767,429). In some aspects, the pharmaceutical composition for the present disclosure can further comprise recombinant human hyaluronidase enzyme, e.g., rHuPH20.

[0198] Recombinant human hyaluronidase PH20 (rHuPH20, Halozyme Therapeutics Inc.) is a glycosylated 447-amino acid single-chain recombinant human polypeptide that depolymerizes hyaluronan in the subcutaneous (SC) space locally at the site of injection. Hyaluronan is a repeating polymer of N-acetyl-glucosamine and glucuronic acid that contributes to the soluble gel-like component of the extracellular matrix of the skin. Depolymerization of hyaluronan by rHuPH20 results in a transient reduction in the viscosity of the gel-like phase of the extracellular matrix and increased hydraulic conductance that facilitates the dispersion and absorption of injected drugs (see rHuPH20 IB). Use of rHuPH20 enables the delivery of large volumes for rapid SC injections (for example, approximately 2 mL to 20 mL), which may shorten dose administration times, reduce administration frequency, and enable potential improvements to the PK profiles of coadministered drugs, including improved absorption, increased bioavailability, accelerated time to maximum concentration (Tmax), increased maximum concentration (Cmax), and decreased PK variability.

[0199] The half-life of rHuPH20 in skin is <30 minutes, and the local permeability barrier in these tissues is restored to pre-injection levels within 24 hours to 48 hours after injection of hyaluronidase. A study showed that rHuPH20 was not detectable systemically in healthy volunteers and patients following SC administration at doses of 10,000 U and 30,000 U. Another study of the PK of rHuPH20 (Halozyme Study HALO-104-104) demonstrated that plasma concentrations of rHuPH20 rapidly declined, with a very short t1/2 (≤10.4 min) and the plasma concentration became undetectable (<0.03 ng/mL) within 1.5 hours after the end of the IV infusion at for IV doses of 10,000 or 30,000 units of rHuPH20.

[0200] Subcutaneous injection of rHuPH20 is generally well-tolerated in healthy participants, dehydrated pediatric participants, hospice and palliative care participants, participants with type 1 and 2 diabetes, and participants with rheumatoid arthritis. Subcutaneous injections of rHuPH20 either alone or coadministered with lactated Ringer's, normal saline, co-injected drugs (morphine, ceftriaxone, insulin and insulin analogues) or biologic products (immunoglobulin G [IgG] and adalimumab) has been well-tolerated.

[0201] In some aspects, the endoglycosidase hydrolase enzyme comprises a modified hyaluronidase comprising one or more amino acid substitutions relative to a wild-type hyaluronidase selected from the group consisting of HuPH20, HYAL1, HYAL2, HYAL3, HYAL4, HYALPS1, or a fragment thereof. In some aspects, the endoglycosidase hydrolase enzyme comprises a modified hyaluronidase comprising one or more amino acid substitution in an alpha-helix region relative to a wild-type hyaluronidase selected from the group consisting of HuPH20, HYAL1, HYAL2, HYAL3, HYAL4, HYALPS1, or a fragment thereof. In some aspects, the endoglycosidase hydrolase enzyme comprises a modified hyaluronidase comprising one or more amino acid substitution in linker region relative to a wild-type hyaluronidase selected from the group consisting of HuPH20, HYAL1, HYAL2, HYAL3, HYAL4, HYALPS1, or a fragment thereof. In some aspects, the endoglycosidase hydrolase enzyme comprises a modified hyaluronidase, wherein one or more N-terminal and/or C-terminal amino acids are deleted relative to a wild-type hyaluronidase selected from the group consisting of HuPH20, HYAL1, HYAL2, HYAL3, HYAL4, HYALPS1, or a fragment thereof.

[0202] In some aspects, the endoglycosidase hydrolase enzyme comprises a modified rHuPH20, wherein the modified rHuPH20 comprises one or more amino acid substitution in an alpha-helix region, a linker region, or both an alpha-helix region and a linker region relative to wild-type rHuPH20. In some aspects, the endoglycosidase hydrolase enzyme comprises a modified rHuPH20, wherein the modified rHuPH20 comprises deletion of one or more N-terminal amino acid, one or more C-terminal amino acid, or one or more N-terminal amino acid and one or more C-terminal amino acid relative to wild-type rHuPH20. In some aspects, the endoglycosidase hydrolase enzyme comprises a modified rHuPH20, wherein the modified rHuPH20 comprises one or more amino acid substitution in an alpha-helix region, a linker region, or both an alpha-helix region and a linker region relative to wild-type rHuPH20; and wherein the modified rHuPH20 comprises deletion of one or more N-terminal amino acid, one or more C-terminal amino acid, or one or more N-terminal amino acid and one or more C-terminal amino acid relative to wild-type rHuPH20

[0203] Additional, non-limiting examples of endoglycosidase hydrolase enzymes are found in EP3636752, which is incorporated by reference herein in its entirety.

[0204] In some aspects, the endoglycosidase hydrolase enzyme is any polypeptide having endoglycosidase hydrolase enzyme activity disclosed in U.S. Pat. Nos. 9,447,401; 10,865,400; 11,041,149; 11,066,656; 8,927,249; 9,284,543; 10,588,983; U.S. Ser. No. 10/328,130; and/or U.S. Pat. No. 9,993,529, each of which is incorporated by reference herein in its entirety. In some aspects, the endoglycosidase hydrolase enzyme is any polypeptide having endoglycosidase hydrolase enzyme activity disclosed in International Publication No. WO/13/102144, WO/10/077297, WO/15/003167, WO/04/078140 WO/09/128917, WO/12/174478, and/or WO/12/174480, each of which is incorporated by reference herein in its entirety. In some aspects, the endoglycosidase hydrolase enzyme comprises an amino acid sequence at least about 70%, at least about 75%, at least about 80%, at least about 85%, at least about 90%, at least about 95%, at least about 96%, at least about 97%, at least about 98%, at least about 99%, or about 100% identical to an amino acid sequence selected from the amino acid sequences set forth in SEQ ID NOs: 5-52. In some aspects, the endoglycosidase hydrolase enzyme comprises an amino acid sequence selected from the amino acid sequences set forth in SEQ ID NOs: 5-52.

[0205] In some aspects, the endoglycosidase hydrolase enzyme is any polypeptide having endoglycosidase hydrolase enzyme activity disclosed in US Patent Application Publication No. US2021155913A1 and/or US2021363270A1; and/or International Publication Nos. WO/20/022791, WO/20/197230 and/or WO/21/150079; each of which is incorporated by reference herein in its entirety. In some aspects, the endoglycosidase hydrolase enzyme comprises an amino acid sequence at least about 70%, at least about 75%, at least about 80%, at least about 85%, at least about 90%, at least about 95%, at least about 96%, at least about 97%, at least about 98%, at least about 99%, or about 100% identical to an amino acid sequence selected from the amino acid sequences set forth in SEQ ID NOs: 53-263. In some aspects, the endoglycosidase hydrolase enzyme comprises an amino acid sequence at least about 70%, at least about 75%, at least about 80%, at least about 85%, at least about 90%, at least about 95%, at least about 96%, at least about 97%, at least about 98%, at least about 99%, or about 100% identical to the amino acid sequence set forth in SEQ ID NO: 92. In some aspects, the endoglycosidase hydrolase enzyme comprises an amino acid sequence selected from the amino acid sequences set forth in SEQ ID NOs: 53-263. In some aspects, the endoglycosidase hydrolase enzyme comprises the amino acid sequence set forth in SEQ ID NO: 92. In some aspects, the endoglycosidase hydrolase enzyme is HP46 (SEQ ID NO: 44 of Int'l Publication No. WO/20/197230).

[0206] In certain aspects, a pharmaceutical composition disclosed herein comprises a hyaluronidase. In some aspects, the pharmaceutical composition comprises a sufficient concentration of a hyaluronidase for administration of at least about 20,000 units of the hyaluronidase. In some aspects, the hyaluronidase is rHuPH20. In other aspects, the pharmaceutical composition does not comprise a hyaluronidase.

[0207] In some aspects, the anti-PD-1 antibody or the anti-PD-L1 antibody and the endoglycosidase hydrolase enzyme (e.g., rHuPH20) are administered together. In some aspects, the anti-PD-1 antibody or the anti-PD-L1 antibody and the endoglycosidase hydrolase enzyme (e.g., rHuPH20) are administered concurrently. In some aspects, the anti-PD-1 antibody or the anti-PD-L1 antibody and the endoglycosidase hydrolase enzyme (e.g., rHuPH20) are administered sequentially.

[0208] In some aspects, the anti-PD-1 antibody or the anti-PD-L1 antibody and the endoglycosidase hydrolase enzyme (e.g., rHuPH20) are present in a single pharmaceutical composition.

[0209] In some aspects, the dose comprises at least about 5000 units to at least about 100,000 units of an endoglycosidase hydrolase enzyme (e.g., rHuPH20). In some aspects, the dose comprises at least about 5000 units, at least about 10,000 units, at least about 15,000 units, at least about 20,000 units, at least about 25,000 units, at least about 30,000 units, at least about 35,000 units, at least about 40,000 units, at least about 45,000 units, at least about 50,000 units, at least about 55,000 units, at least about 60,000 units, at least about 65,000 units, at least about 70,000 units, at least about 75,000 units, at least about 80,000 units, at least about 85,000 units, at least about 90,000 units, at least about 95,000 units, or at least about 100,000 units of an endoglycosidase hydrolase enzyme (e.g., rHuPH20). In some aspects, the dose comprises at least about 20,000 units of an endoglycosidase hydrolase enzyme (e.g., rHuPH20). In some aspects, the dose comprises at least about 30,000 units of an endoglycosidase hydrolase enzyme (e.g., rHuPH20). In some aspects, the dose comprises at least about 40,000 units of an endoglycosidase hydrolase enzyme (e.g., rHuPH20). In some aspects, the dose comprises at least about 50,000 units of an endoglycosidase hydrolase enzyme (e.g., rHuPH20). In some aspects, the dose comprises at least about 60,000 units of an endoglycosidase hydrolase enzyme (e.g., rHuPH20). In some aspects, the dose comprises at least about 70,000 units of an endoglycosidase hydrolase enzyme (e.g., rHuPH20). In some aspects, the dose comprises at least about 80,000 units of an endoglycosidase hydrolase enzyme (e.g., rHuPH20). In some aspects, the dose comprises at least about 90,000 units of an endoglycosidase hydrolase enzyme (e.g., rHuPH20). In some aspects, the dose comprises at least about 100,000 units of an endoglycosidase hydrolase enzyme (e.g., rHuPH20).

[0210] It would be readily apparent to a person of ordinary skill in the art that the amount of the endoglycosidase hydrolase enzyme (e.g., rHuPH20) can be expressed in terms of units or the amount of the endoglycosidase hydrolase enzyme (e.g., rHuPH20) can be expressed in terms mg (or in other weight-based units). For example, in some aspects, the dose comprises an amount of an endoglycosidase hydrolase enzyme (e.g., rHuPH20) expressed as at least about 500 U or at least about 0.00455 mg. In another example, in some aspects, the dose comprises an amount of an endoglycosidase hydrolase enzyme (e.g., rHuPH20) expressed as at least about 2000 U or at least about 0.0182 mg.

[0211] II.B. Anti-PD-1 Antibodies Useful for the Disclosure

[0212] Anti-PD-1 antibodies that are known in the art can be used in the presently described compositions and methods. Various human monoclonal antibodies that bind specifically to PD-1 with high affinity have been disclosed in U.S. Pat. No. 8,008,449. Anti-PD-1 human antibodies disclosed in U.S. Pat. No. 8,008,449 have been demonstrated to exhibit one or more of the following characteristics: (a) bind to human PD-1 with a K_{D} of 1×10⁻⁷ M or less, as determined by surface plasmon resonance using a Biacore biosensor system; (b) do not substantially bind to human CD28, CTLA-4 or ICOS; (c) increase T-cell proliferation in a Mixed Lymphocyte Reaction (MLR) assay; (d) increase interferon-γ production in an MLR assay; (e) increase IL-2 secretion in an MLR assay; (f) bind to human PD-1 and cynomolgus monkey PD-1; (g) inhibit the binding of PD-L1 and/or PD-L2 to PD-1; (h) stimulate antigen-specific memory responses; (i) stimulate antibody responses; and (j) inhibit tumor cell growth in vivo. Anti-PD-1 antibodies usable in the present disclosure include monoclonal antibodies that bind specifically to human PD-1 and exhibit at least one, in some aspects, at least five, of the preceding characteristics.

[0213] Other anti-PD-1 monoclonal antibodies have been described in, for example, U.S. Pat. Nos. 6,808,710, 7,488,802, 8,168,757 and 8,354,509, US Publication No. 2016/0272708, and PCT Publication Nos. WO 2012/145493, WO 2008/156712, WO 2015/112900, WO 2012/145493, WO 2015/112800, WO 2014/206107, WO 2015/35606, WO 2015/085847, WO 2014/179664, WO 2017/020291, WO 2017/020858, WO 2016/197367, WO 2017/024515, WO 2017/025051, WO 2017/123557, WO 2016/106159, WO 2014/194302, WO 2017/040790, WO 2017/133540, WO 2017/132827, WO 2017/024465, WO 2017/025016, WO 2017/106061, WO 2017/19846, WO 2017/024465, WO 2017/025016, WO 2017/132825, and WO 2017/133540 each of which is incorporated by reference in its entirety.

[0214] In some aspects, the anti-PD-1 antibody is selected from the group consisting of nivolumab (also known as OPDIVO®, 5C4, BMS-936558, MDX-1106, and ONO-4538), pembrolizumab (Merck; also known as KEYTRUDA®, lambrolizumab, and MK-3475; see WO2008/156712), PDR001 (Novartis; see WO 2015/112900), MEDI-0680 (AstraZeneca; also known as AMP-514; see WO 2012/145493), cemiplimab (Regeneron; also known as REGN-2810; see WO 2015/112800), JS001 (TAIZHOU JUNSHI PHARMA; also known as toripalimab; see Si-Yang Liu et al., J. Hematol. Oncol. 10:136 (2017)), BGB-A317 (Beigene; also known as Tislelizumab; see WO 2015/35606 and US 2015/0079109), INCSHR1210 (Jiangsu Hengrui Medicine; also known as SHR-1210; see WO 2015/085847; Si-Yang Liu et al., J. Hematol. Oncol. 10:136 (2017)), TSR-042 (Tesaro Biopharmaceutical; also known as ANB011; see WO2014/179664), GLS-010 (Wuxi/Harbin Gloria Pharmaceuticals; also known as WBP3055; see Si-Yang Liu et al., J. Hematol. Oncol. 10:136 (2017)), AM-0001 (Armo), STI-1110 (Sorrento Therapeutics; see WO 2014/194302), AGEN2034 (Agenus; see WO 2017/040790), MGA012 (Macrogenics, see WO 2017/19846), BCD-100 (Biocad; Kaplon et al., mAbs 10(2):183-203 (2018), IBI308 (Innovent; see WO 2017/024465, WO 2017/025016, WO 2017/132825, and WO 2017/133540); and sasanlimab (PF-06801591).

[0215] In one aspect, the anti-PD-1 antibody is nivolumab. Nivolumab is a fully human IgG4 (S228P) PD-1 immune checkpoint inhibitor antibody that selectively prevents interaction with PD-1 ligands (PD-L1 and PD-L2), thereby blocking the down-regulation of antitumor T-cell functions (U.S. Pat. No. 8,008,449; Wang et al., 2014 Cancer Immunol Res. 2(9):846-56). The heavy chain variable and light chain variable regions for nivolumab are shown in Table 1B (SEQ ID NOs: 2 and 3). In some aspects, the anti-PD-1 antibody comprises a heavy chain variable region comprising the amino acid sequence set forth in SEQ ID NO: 2, and a light chain variable region comprising the amino acid sequence set forth in SEQ ID NO: 3. In some aspects, the antibody comprises heavy chain complementarity determining region (CDR) 1, CDR2, and CDR3 sequences comprising the amino acid sequences of the heavy chain CDR1, CDR2, and CDR3 of SEQ ID NO: 2. In some aspects, the antibody comprises light chain CDR1, CDR2, and CDR3 sequences comprising the amino acid sequences of the light chain CDR1, CDR2, and CDR3 of SEQ ID NO: 3.

TABLE 1B
Anti-PD-1 Antibody Sequences

| | |
|---|---|
| Anti-PD-1 | QVQLVESGGG VVQPGRSLRL DCKASGITFS |
| Antibody | NSGMHWVRQA PGKGLEWVAV |
| Heavy Chain | IWYDGSKRYY ADSVKGRFTI SRDNSKNTLF |
| Variable | LQMNSLRAED TAVYYCATND |
| Region | DYWGQGTLVT VSS (SEQ ID NO: 2) |
| Anti-PD-1 | EIVLTQSPAT LSLSPGERAT LSCRASQSVS |
| Antibody | SYLAWYQQKP GQAPRLLIYD |
| Light Chain | ASNRATGIPA RFSGSGSGTD FTLTISSLEP |
| Variable | EDFAVYYCQQ SSNWPRTFGQ |
| Region | GTKVEIK (SEQ ID NO: 3) |

[0216] In another aspect, the anti-PD-1 antibody is pembrolizumab. Pembrolizumab is a humanized monoclonal IgG4 (S228P) antibody directed against human cell surface receptor PD-1 (programmed death-1 or programmed cell death-1). Pembrolizumab is described, for example, in U.S. Pat. Nos. 8,354,509 and 8,900,587.

[0217] Anti-PD-1 antibodies usable in the disclosed compositions and methods also include isolated antibodies that bind specifically to human PD-1 and cross-compete for binding to human PD-1 with any anti-PD-1 antibody disclosed herein, e.g., nivolumab (see, e.g., U.S. Pat. Nos. 8,008,449 and 8,779,105; WO 2013/173223). In some aspects, the anti-PD-1 antibody binds the same epitope as any of the anti-PD-1 antibodies described herein, e.g., nivolumab. The ability of antibodies to cross-compete for binding to an antigen indicates that these monoclonal antibodies bind to the same epitope region of the antigen and sterically hinder the binding of other cross-competing antibodies to that particular epitope region. These cross-competing antibodies are expected to have functional properties very similar those of the reference antibody, e.g., nivolumab, by virtue of their binding to the same epitope region of PD-1. Cross-competing antibodies can be readily identified based on their ability to cross-compete with nivolumab in standard PD-1 binding assays such as Biacore analysis, ELISA assays or flow cytometry (see, e.g., WO 2013/173223).

[0218] In certain aspects, the antibodies that cross-compete for binding to human PD-1 with, or bind to the same epitope region of human PD-1 antibody, nivolumab, are monoclonal antibodies. For administration to human subjects, these cross-competing antibodies are chimeric antibodies, engineered antibodies, or humanized or human antibodies. Such chimeric, engineered, humanized or human monoclonal antibodies can be prepared and isolated by methods well known in the art.

[0219] Anti-PD-1 antibodies usable in the compositions and methods of the disclosed disclosure also include antigen-binding portions of the above antibodies. It has been amply demonstrated that the antigen-binding function of an antibody can be performed by fragments of a full-length antibody.

[0220] Anti-PD-1 antibodies suitable for use in the disclosed compositions and methods are antibodies that bind to PD-1 with high specificity and affinity, block the binding of PD-L1 and or PD-L2, and inhibit the immunosuppressive effect of the PD-1 signaling pathway. In any of the compositions or methods disclosed herein, an anti-PD-1 “antibody” includes an antigen-binding portion or fragment that binds to the PD-1 receptor and exhibits the functional properties similar to those of whole antibodies in inhibiting ligand binding and up-regulating the immune system. In certain aspects, the anti-PD-1 antibody or antigen-binding portion thereof cross-competes with nivolumab for binding to human PD-1.

[0221] In some aspects, the anti-PD-1 antibody is administered at a dose ranging from 0.1 mg/kg to 20.0 mg/kg body weight once every 2, 3, 4, 5, 6, 7, or 8 weeks, e.g., 0.1 mg/kg to 10.0 mg/kg body weight once every 2, 3, or 4 weeks. In other aspects, the anti-PD-1 antibody is administered at a dose of about 2 mg/kg, about 3 mg/kg, about 4 mg/kg, about 5 mg/kg, about 6 mg/kg, about 7 mg/kg, about 8 mg/kg, about 9 mg/kg, or 10 mg/kg body weight once every 2 weeks. In other aspects, the anti-PD-1 antibody is administered at a dose of about 2 mg/kg, about 3 mg/kg, about 4 mg/kg, about 5 mg/kg, about 6 mg/kg, about 7 mg/kg, about 8 mg/kg, about 9 mg/kg, or 10 mg/kg body weight once every 3 weeks. In one aspect, the anti-PD-1 antibody is administered at a dose of about 5 mg/kg body weight about once every 3 weeks. In another aspect, the anti-PD-1 antibody, e.g., nivolumab, is administered at a dose of about 3 mg/kg body weight about once every 2 weeks. In other aspects, the anti-PD-1 antibody, e.g., pembrolizumab, is administered at a dose of about 2 mg/kg body weight about once every 3 weeks.

[0222] The anti-PD-1 antibody useful for the present disclosure can be administered as a flat dose. In some aspects, the anti-PD-1 antibody is administered at a flat dose of from about 100 to about 1000 mg, from about 100 mg to about 900 mg, from about 100 mg to about 800 mg, from about 100 mg to about 700 mg, from about 100 mg to about 600 mg, from about 100 mg to about 500 mg, from about 200 mg to about 1000 mg, from about 200 mg to about 900 mg, from about 200 mg to about 800 mg, from about 200 mg to about 700 mg, from about 200 mg to about 600 mg, from about 200 mg to about 500 mg, from about 200 mg to about 480 mg, or from about 240 mg to about 480 mg, In one aspect, the anti-PD-1 antibody is administered as a flat dose of at least about 200 mg, at least about 220 mg, at least about 240 mg, at least about 260 mg, at least about 280 mg, at least about 300 mg, at least about 320 mg, at least about 340 mg, at least about 360 mg, at least about 380 mg, at least about 400 mg, at least about 420 mg, at least about 440 mg, at least about 460 mg, at least about 480 mg, at least about 500 mg, at least about 520 mg, at least about 540 mg, at least about 550 mg, at least about 560 mg, at least about 580 mg, at least about 600 mg, at least about 620 mg, at least about 640 mg, at least about 660 mg, at least about 680 mg, at least about 700 mg, or at least about 720 mg at a dosing interval of about 1, 2, 3, 4, 5, 6, 7, 8, 9, or 10 weeks. In another aspects, the anti-PD-1 antibody is administered as a flat dose of about 200 mg to about 800 mg, about 200 mg to about 700 mg, about 200 mg to about 600 mg, about 200 mg to about 500 mg, at a dosing interval of about 1, 2, 3, or 4 weeks.

[0223] In some aspects, the anti-PD-1 antibody is administered as a flat dose of about 200 mg at about once every 3 weeks. In other aspects, the anti-PD-1 antibody is administered as a flat dose of about 200 mg at about once every 2 weeks. In other aspects, the anti-PD-1 antibody is administered as a flat dose of about 240 mg at about once every 2 weeks. In certain aspects, the anti-PD-1 antibody is administered as a flat dose of about 480 mg at about once every 4 weeks.

[0224] In some aspects, nivolumab is administered at a flat dose of about 240 mg once about every 2 weeks. In some aspects, nivolumab is administered at a flat dose of about 240 mg once about every 3 weeks. In some aspects, nivolumab is administered at a flat dose of about 360 mg once about every 3 weeks. In some aspects, nivolumab is administered at a flat dose of about 480 mg once about every 4 weeks. In some aspects, nivolumab is administered at a flat dose of about 720 mg once about every 6 weeks. In some aspects, nivolumab is administered at a flat dose of about 960 mg once about every 8 weeks.

[0225] In some aspects, pembrolizumab is administered at a flat dose of about 200 mg once about every 2 weeks. In some aspects, pembrolizumab is administered at a flat dose of about 200 mg once about every 3 weeks. In some aspects, pembrolizumab is administered at a flat dose of about 400 mg once about every 4 weeks.

[0226] In some aspects, the pharmaceutical composition comprises a bispecific antibody or a multispecific antibody comprising a first antigen binding moiety and a second antigen binding moiety, wherein the first antigen binding moiety comprises an anti-PD-1 antigen binding portion (e.g., scFv of nivolumab). In some aspects, the second antigen binding moiety is an antigen binding portion of any one of the antibodies disclosed herein. In some aspects, the second antigen binding moiety is an antigen binding portion of an anti-LAG-3 antibody, e.g., relatlimab.

[0227] In some aspects, the pharmaceutical composition comprises a multispecific antibody comprising a first antigen binding moiety, a second antigen binding moiety, and at least a third antigen binding moiety, wherein the first antigen binding moiety comprises an anti-PD-1 antigen binding portion (e.g., scFv of nivolumab).

[0228] II.C. Anti-PD-L1 Antibodies Useful for the Disclosure

[0229] In certain aspects, an anti-PD-L1 antibody is substituted for the anti-PD-1 antibody in any of the methods disclosed herein. Any anti-PD-L1 antibodies can be used in the compositions and methods of the present disclosure. Examples of anti-PD-L1 antibodies useful in the compositions and methods of the present disclosure include the antibodies disclosed in U.S. Pat. No. 9,580,507. Anti-PD-L1 human monoclonal antibodies disclosed in U.S. Pat. No. 9,580,507 have been demonstrated to exhibit one or more of the following characteristics: (a) bind to human PD-L1 with a K_{D} of 1×10⁻⁷ M or less, as determined by surface plasmon resonance using a Biacore biosensor system; (b) increase T-cell proliferation in a Mixed Lymphocyte Reaction (MLR) assay; (c) increase interferon-γ production in an MLR assay; (d) increase IL-2 secretion in an MLR assay; (e) stimulate antibody responses; and (f) reverse the effect of T regulatory cells on T cell effector cells and/or dendritic cells. Anti-PD-L1 antibodies usable in the present disclosure include monoclonal antibodies that bind specifically to human PD-L1 and exhibit at least one, in some aspects, at least five, of the preceding characteristics.

[0230] In certain aspects, the anti-PD-L1 antibody is selected from the group consisting of BMS-936559 (also known as 12A4, MDX-1105; see, e.g., U.S. Pat. No. 7,943,743 and WO 2013/173223), atezolizumab (Roche; also known as TECENTRIQ®; MPDL3280A, RG7446; see U.S. Pat. No. 8,217,149; see, also, Herbst et al. (2013) J Clin Oncol 31(suppl):3000), durvalumab (AstraZeneca; also known as IMFINZI™, MEDI-4736; see WO 2011/066389), avelumab (Pfizer; also known as BAVENCIO®, MSB-0010718C; see WO 2013/079174), STI-1014 (Sorrento; see WO2013/181634), CX-072 (Cytomx; see WO2016/149201), KN035 (3D Med/Alphamab; see Zhang et al., Cell Discov. 7:3 (March 2017), LY3300054 (Eli Lilly Co.; see, e.g., WO 2017/034916), BGB-A333 (BeiGene; see Desai et al., JCO 36 (15suppl):TPS3113 (2018)), and CK-301 (Checkpoint Therapeutics; see Gorelik et al., AACR:Abstract 4606 (April 2016)).

[0231] In certain aspects, the PD-L1 antibody is atezolizumab (TECENTRIQ®). Atezolizumab is a fully humanized IgG1 monoclonal anti-PD-L1 antibody.

[0232] In certain aspects, the PD-L1 antibody is durvalumab (IMFINZI™). Durvalumab is a human IgG1 kappa monoclonal anti-PD-L1 antibody.

[0233] In certain aspects, the PD-L1 antibody is avelumab (BAVENCIO®). Avelumab is a human IgG1 lambda monoclonal anti-PD-L1 antibody.

[0234] Anti-PD-L1 antibodies usable in the disclosed compositions and methods also include isolated antibodies that bind specifically to human PD-L1 and cross-compete for binding to human PD-L1 with any anti-PD-L1 antibody disclosed herein, e.g., atezolizumab, durvalumab, and/or avelumab. In some aspects, the anti-PD-L1 antibody binds the same epitope as any of the anti-PD-L1 antibodies described herein, e.g., atezolizumab, durvalumab, and/or avelumab. The ability of antibodies to cross-compete for binding to an antigen indicates that these antibodies bind to the same epitope region of the antigen and sterically hinder the binding of other cross-competing antibodies to that particular epitope region. These cross-competing antibodies are expected to have functional properties very similar those of the reference antibody, e.g., atezolizumab and/or avelumab, by virtue of their binding to the same epitope region of PD-L1. Cross-competing antibodies can be readily identified based on their ability to cross-compete with atezolizumab and/or avelumab in standard PD-L1 binding assays such as Biacore analysis, ELISA assays or flow cytometry (see, e.g., WO 2013/173223).

[0235] In certain aspects, the antibodies that cross-compete for binding to human PD-L1 with, or bind to the same epitope region of human PD-L1 antibody as, atezolizumab, durvalumab, and/or avelumab, are monoclonal antibodies. For administration to human subjects, these cross-competing antibodies are chimeric antibodies, engineered antibodies, or humanized or human antibodies. Such chimeric, engineered, humanized or human monoclonal antibodies can be prepared and isolated by methods well known in the art.

[0236] Anti-PD-L1 antibodies usable in the compositions and methods of the disclosed disclosure also include antigen-binding portions of the above antibodies. It has been amply demonstrated that the antigen-binding function of an antibody can be performed by fragments of a full-length antibody.

[0237] Anti-PD-L1 antibodies suitable for use in the disclosed compositions and methods are antibodies that bind to PD-L1 with high specificity and affinity, block the binding of PD-1, and inhibit the immunosuppressive effect of the PD-1 signaling pathway. In any of the compositions or methods disclosed herein, an anti-PD-L1 “antibody” includes an antigen-binding portion or fragment that binds to PD-L1 and exhibits the functional properties similar to those of whole antibodies in inhibiting receptor binding and up-regulating the immune system. In certain aspects, the anti-PD-L1 antibody or antigen-binding portion thereof cross-competes with atezolizumab, durvalumab, and/or avelumab for binding to human PD-L1.

[0238] The anti-PD-L1 antibody useful for the present disclosure can be any PD-L1 antibody that specifically binds to PD-L1, e.g., antibodies that cross-compete with durvalumab, avelumab, or atezolizumab for binding to human PD-1, e.g., an antibody that binds to the same epitope as durvalumab, avelumab, or atezolizumab. In a particular aspect, the anti-PD-L1 antibody is durvalumab. In other aspects, the anti-PD-L1 antibody is avelumab. In some aspects, the anti-PD-L1 antibody is atezolizumab.

[0239] In some aspects, the anti-PD-L1 antibody is administered at a dose ranging from about 0.1 mg/kg to about 20.0 mg/kg body weight, about 2 mg/kg, about 3 mg/kg, about 4 mg/kg, about 5 mg/kg, about 6 mg/kg, about 7 mg/kg, about 8 mg/kg, about 9 mg/kg, about 10 mg/kg, about 11 mg/kg, about 12 mg/kg, about 13 mg/kg, about 14 mg/kg, about 15 mg/kg, about 16 mg/kg, about 17 mg/kg, about 18 mg/kg, about 19 mg/kg, or about 20 mg/kg, about once every 2, 3, 4, 5, 6, 7, or 8 weeks.

[0240] In some aspects, the anti-PD-L1 antibody is administered at a dose of about 15 mg/kg body weight at about once every 3 weeks. In other aspects, the anti-PD-L1 antibody is administered at a dose of about 10 mg/kg body weight at about once every 2 weeks.

[0241] In other aspects, the anti-PD-L1 antibody useful for the present disclosure is a flat dose. In some aspects, the anti-PD-L1 antibody is administered as a flat dose of from about 200 mg to about 1600 mg, about 200 mg to about 1500 mg, about 200 mg to about 1400 mg, about 200 mg to about 1300 mg, about 200 mg to about 1200 mg, about 200 mg to about 1100 mg, about 200 mg to about 1000 mg, about 200 mg to about 900 mg, about 200 mg to about 800 mg, about 200 mg to about 700 mg, about 200 mg to about 600 mg, about 700 mg to about 1300 mg, about 800 mg to about 1200 mg, about 700 mg to about 900 mg, or about 1100 mg to about 1300 mg. In some aspects, the anti-PD-L1 antibody is administered as a flat dose of at least about 240 mg, at least about 300 mg, at least about 320 mg, at least about 400 mg, at least about 480 mg, at least about 500 mg, at least about 560 mg, at least about 600 mg, at least about 640 mg, at least about 700 mg, at least 720 mg, at least about 800 mg, at least about 840 mg, at least about 880 mg, at least about 900 mg, at least 960 mg, at least about 1000 mg, at least about 1040 mg, at least about 1100 mg, at least about 1120 mg, at least about 1200 mg, at least about 1280 mg, at least about 1300 mg, at least about 1360 mg, or at least about 1400 mg, at a dosing interval of about 1, 2, 3, or 4 weeks. In some aspects, the anti-PD-L1 antibody is administered as a flat dose of about 1200 mg at about once every 3 weeks. In other aspects, the anti-PD-L1 antibody is administered as a flat dose of about 800 mg at about once every 2 weeks. In other aspects, the anti-PD-L1 antibody is administered as a flat dose of about 840 mg at about once every 2 weeks.

[0242] In some aspects, atezolizumab is administered as a flat dose of about 1200 mg once about every 3 weeks. In some aspects, atezolizumab is administered as a flat dose of about 800 mg once about every 2 weeks. In some aspects, atezolizumab is administered as a flat dose of about 840 mg once about every 2 weeks.

[0243] In some aspects, avelumab is administered as a flat dose of about 800 mg once about every 2 weeks.

[0244] In some aspects, durvalumab is administered at a dose of about 10 mg/kg once about every 2 weeks. In some aspects, durvalumab is administered as a flat dose of about 800 mg/kg once about every 2 weeks. In some aspects, durvalumab is administered as a flat dose of about 1200 mg/kg once about every 3 weeks.

[0245] In some aspects, the antibody is a multispecific antibody, e.g., a bispecific antibody, that specifically (i) PD-L1 and (ii) a second antigen. In some aspects, the antibody is a multispecific antibody, e.g., a bispecific antibody, that specifically (i) PD-L1 and (ii) CD3.

[0246] II.D. Combination Therapies

[0247] In some aspects of the present disclosure, the methods disclosed herein comprise administering an anti-PD-1 antibody (or an anti-PD-L1 antibody) in combination with an additional anticancer therapy. The additional anticancer therapy can comprise any therapy for the treatment of a tumor in a subject and/or any standard-of-care therapy, as disclosed herein. In some aspects, the additional anticancer therapy comprises a surgery, a radiation therapy, a chemotherapy, an immunotherapy, or any combination thereof. In some aspects, the additional anticancer therapy comprises a chemotherapy, including any chemotherapy disclosed herein. In some aspect, the additional anticancer therapy comprises an immunotherapy. In some aspects, the additional anticancer therapy comprises administration of an antibody or antigen-binding portion thereof that specifically binds CTLA-4, LAG-3, TIGIT, TIM3, NKG2a, OX40, ICOS, MICA, CD137, KIR, TGFβ, IL-10, IL-8, B7-H4, Fas ligand, CXCR4, mesothelin, CD27, GITR, or any combination thereof. In some aspects, the additional anticancer therapy comprises administering an IL-2 (e.g., a modified IL-2, e.g., pegylated IL-2, e.g., bempegaldesleukin). In some aspects, the second therapeutic agent, the third therapeutic agent, or both comprises IL12-Fc (e.g., BMS-986415).

[0248] In some aspects, the anti-PD-1 antibody or the anti-PD-L1 antibody is administered subcutaneously according to any method disclosed herein, and the additional anti-cancer therapy is administered by any suitable route known in the art. In some aspects, the anti-PD-1 antibody or the anti-PD-L1 antibody is administered subcutaneously according to any method disclosed herein, and the additional anti-cancer therapy is administered subcutaneously. In some aspects, the anti-PD-1 antibody or the anti-PD-L1 antibody is administered subcutaneously according to any method disclosed herein, and the additional anti-cancer therapy is administered intravenously. In some aspects, the anti-PD-1 antibody or the anti-PD-L1 antibody and the additional anticancer therapy are administered concurrently. In some aspects, the anti-PD-1 antibody or the anti-PD-L1 antibody and the additional anticancer therapy are administered sequentially. In some aspects, the anti-PD-1 antibody or the anti-PD-L1 antibody and the additional anticancer therapy are administered on the same day. In some aspects, the anti-PD-1 antibody or the anti-PD-L1 antibody and the additional anticancer therapy are administered on different days.

[0249] In some aspects, the anti-PD-1 antibody or the anti-PD-L1 antibody and the additional anticancer therapy, e.g., a checkpoint inhibitor, are combined in a single formulation.

[0250] In some aspects, the method comprises administering a therapeutically effective amount of an anti-PD-1 antibody and an anti-CTLA-4 antibody, e.g., ipilimumab. In other aspects, the method comprises administering a therapeutically effective amount of a composition comprising an anti-PD-1 antibody and an anti-CTLA-4 antibody. Human monoclonal antibodies that bind specifically to CTLA-4 with high affinity have been disclosed in U.S. Pat. No. 6,984,720. Other anti-CTLA-4 monoclonal antibodies have been described in, for example, U.S. Pat. Nos. 5,977,318, 6,051,227, 6,682,736, and 7,034,121 and International Publication Nos. WO 2012/122444, WO 2007/113648, WO 2016/196237, and WO 2000/037504, each of which is incorporated by reference herein in its entirety. In certain aspects, the CTLA-4 antibody is selected from the group consisting of ipilimumab (also known as YERVOY®, MDX-010, 10DI; see U.S. Pat. No. 6,984,720), MK-1308 (Merck), AGEN-1884 (Agenus Inc.; see WO 2016/196237), and tremelimumab (AstraZeneca; also known as ticilimumab, CP-675,206; see WO 2000/037504 and Ribas, Update Cancer Ther. 2(3): 133-39 (2007)). In particular aspects, the anti-CTLA-4 antibody is ipilimumab. In particular aspects, the CTLA-4 antibody is tremelimumab. In particular aspects, the CTLA-4 antibody is MK-1308. In particular aspects, the CTLA-4 antibody is AGEN-1884.

[0251] In some aspects, the method comprises administering a therapeutically effective amount of an anti-PD-1 antibody and an anti-LAG-3 antibody. In other aspects, the method comprises administering a therapeutically effective amount of a single formulation comprising an anti-PD-1 antibody and an anti-LAG-3 antibody, e.g., relatlimab. In some aspects, the anti-LAG-3 antibody is relatlimab, e.g., BMS-986016 as described in PCT/US13/48999, the teachings of which are hereby incorporated by reference. In some aspects, the anti-LAG-3 antibody cross-competes with relatlimab for binding to human LAG-3. In some aspects, the anti-LAG-3 antibody binds to the same epitope as relatlimab. In some aspects, the anti-LAG-3 antibody is a biosimilar of relatlimab. In some aspects, the anti-LAG-3 antibody is LAG-525, MK-4280, REGN3767, TSR-033, TSR-075, Sym022, FS-118, or any combination thereof.

[0252] In some aspects, the method comprises administering a therapeutically effective amount of an anti-PD-1 antibody or an anti-PD-L1 antibody according to any method disclosed herein and a chemotherapy. In some aspects, the chemotherapy comprises a platinum-based therapy. In some aspects, the platinum-based therapy comprises a platinum-based antineoplastic selected from the group consisting of cisplatin, carboplatin, oxaliplatin, nedaplatin, triplatin tetranitrate, phenanthriplatin, picoplatin, satraplatin, and any combination thereof. In certain aspects, the platinum-based therapy comprises cisplatin. In one particular aspect, the platinum-based therapy comprises carboplatin. In some aspects, the chemotherapy comprises an anticancer agent selected from the group consisting of a platinum agent (e.g., cisplatin, carboplatin), a taxanes agent (e.g., paclitaxel, albumin-bound paclitaxel, docetaxel), vinorelbine, vinblastine, etoposide, pemetrexed, gemcitabine, bevacizumab (AVASTIN®), erlotinib (TARCEVA®), crizotinib (XALKORI®), cetuximab (ERBITUX®), and any combination thereof. In certain aspects, the chemotherapy comprises a platinum-based doublet chemotherapy.

[0253] II.E. Tumors

[0254] Certain aspects of the present disclosure are directed to methods of treating a subject in need thereof, comprising subcutaneously delivering an anti-PD-1 antibody or an anti-PD-L1 antibody. In some aspects, the subject is afflicted with a cancer (e.g., a tumor derived from a cancer). In some aspects, the tumor is derived from a cancer selected from the group consisting of squamous cell carcinoma, small-cell lung cancer (SCLC), non-small cell lung cancer (NSCLC), squamous NSCLC, nonsquamous NSCLC, glioma, gastrointestinal cancer, renal cancer, clear cell carcinoma, ovarian cancer, liver cancer, colorectal cancer, endometrial cancer, kidney cancer, renal cell carcinoma (RCC), prostate cancer, hormone refractory prostate adenocarcinoma, thyroid cancer, neuroblastoma, pancreatic cancer, glioblastoma, glioblastoma multiforme, cervical cancer, stomach cancer, bladder cancer, hepatoma, breast cancer, colon carcinoma, head and neck cancer, gastric cancer, germ cell tumor, pediatric sarcoma, sinonasal natural killer, melanoma, bone cancer, skin cancer, uterine cancer, cancer of the anal region, testicular cancer, carcinoma of the fallopian tubes, carcinoma of the endometrium, carcinoma of the cervix, carcinoma of the vagina, carcinoma of the vulva, cancer of the esophagus, cancer of the small intestine, cancer of the endocrine system, cancer of the parathyroid gland, cancer of the adrenal gland, sarcoma of soft tissue, cancer of the urethra, cancer of the penis, rectal cancer, solid tumors of childhood, cancer of the ureter, carcinoma of the renal pelvis, neoplasm of the central nervous system (CNS), primary CNS lymphoma, tumor angiogenesis, spinal axis tumor, brain cancer, brain stem glioma, pituitary adenoma, Kaposi's sarcoma, epidermoid cancer, squamous cell cancer, environmentally-induced cancers including those induced by asbestos, virus-related cancers or cancers of viral origin (e.g., human papilloma virus (HPV-related or -originating tumors)), and any combination thereof. In certain aspects, the subject has received one, two, three, four, five or more prior cancer treatments. In other aspects, the subject is treatment-naïve. In some aspects, the subject has progressed on other cancer treatments. In certain aspects, the prior cancer treatment comprised an immunotherapy. In other aspects, the prior cancer treatment comprised a chemotherapy. In some aspects, the tumor has reoccurred. In some aspects, the tumor is metastatic. In other aspects, the tumor is not metastatic. In some aspects, the tumor is locally advanced.

[0255] In some aspects, the subject has received a prior therapy to treat the tumor and the tumor is relapsed or refractory. In certain aspects, the at least one prior therapy comprises a standard-of-care therapy. In some aspects, the at least one prior therapy comprises a surgery, a radiation therapy, a chemotherapy, an immunotherapy, or any combination thereof. In some aspects, the at least one prior therapy comprises a chemotherapy. In some aspects, the subject has received a prior immuno-oncology (I-O) therapy to treat the tumor and the tumor is relapsed or refractory. In some aspects, the subject has received more than one prior therapy to treat the tumor and the subject is relapsed or refractory. In other aspects, the subject has received either an anti-PD-1 or an anti-PD-L1 antibody therapy.

[0256] In some aspects, the previous line of therapy comprises a chemotherapy. In some aspects, the chemotherapy comprises a platinum-based therapy. In some aspects, the platinum-based therapy comprises a platinum-based antineoplastic selected from the group consisting of cisplatin, carboplatin, oxaliplatin, nedaplatin, triplatin tetranitrate, phenanthriplatin, picoplatin, satraplatin, and any combination thereof. In certain aspects, the platinum-based therapy comprises cisplatin. In one particular aspect, the platinum-based therapy comprises carboplatin.

[0257] In some aspects, the at least one prior therapy is selected from a therapy comprising administration of an anticancer agent selected from the group consisting of a platinum agent (e.g., cisplatin, carboplatin), a taxanes agent (e.g., paclitaxel, albumin-bound paclitaxel, docetaxel), vinorelbine, vinblastine, etoposide, pemetrexed, gemcitabine, bevacizumab (AVASTIN®), erlotinib (TARCEVA®), crizotinib (XALKORI®), cetuximab (ERBITUX®), and any combination thereof. In certain aspects, the at least one prior therapy comprises a platinum-based doublet chemotherapy.

[0258] In some aspects, the subject has experienced disease progression after the at least one prior therapy. In certain aspects, the subject has received at least two prior therapies, at least three prior therapies, at least four prior therapies, or at least five prior therapies. In certain aspects, the subject has received at least two prior therapies. In one aspect, the subject has experienced disease progression after the at least two prior therapies. In certain aspects, the at least two prior therapies comprises a first prior therapy and a second prior therapy, wherein the subject has experienced disease progression after the first prior therapy and/or the second prior therapy, and wherein the first prior therapy comprises a surgery, a radiation therapy, a chemotherapy, an immunotherapy, or any combination thereof; and wherein the second prior therapy comprises a surgery, a radiation therapy, a chemotherapy, an immunotherapy, or any combination thereof. In some aspects, the first prior therapy comprises a platinum-based doublet chemotherapy, and the second prior therapy comprises a single-agent chemotherapy. In certain aspects, the single-agent chemotherapy comprises docetaxel.

[0259] In certain aspects, the tumor that is a PD-L1 positive tumor. “PD-L1 positive” as used herein can be interchangeably used with “PD-L1 expression of at least about 1%.” PD-L1 expression can be measured by any methods known in the art. In some aspects, PD-L1 expression is measured by an automated IHC. PD-L1 positive tumors can thus have at least about 1%, at least about 2%, at least about 5%, at least about 10%, at least about 20%, at least about 25%, at least about 30%, at least about 40%, at least about 50%, at least about 60%, at least about 70%, at least about 75%, at least about 80%, at least about 85%, at least about 90%, at least about 95%, or about 100% of the tumor cells expressing PD-L1 as measured by an automated IHC. In certain aspects, “PD-L1 positive” means that there are at least 100 cells that express PD-L1 on the surface of the cells.

[0260] In order to assess the PD-L1 expression, in one aspect, a test tissue sample is obtained from a patient who is in need of a therapy disclosed herein. In another aspect, the assessment of PD-L1 expression is achieved without obtaining a test tissue sample. In some aspects, selecting a suitable patient includes (i) optionally providing a test tissue sample obtained from a patient with cancer of the tissue, the test tissue sample comprising tumor cells and/or tumor-infiltrating inflammatory cells; and (ii) assessing the proportion of cells in the test tissue sample that express PD-L1 on the surface of the cells based on an assessment that the proportion of cells in the test tissue sample that express PD-L1 on the cell surface is higher than a predetermined threshold level.

[0261] In any of the methods comprising the measurement of PD-L1 expression in a test tissue sample, however, it should be understood that the step comprising the provision of a test tissue sample obtained from a patient is an optional step. It should also be understood that in certain aspects the “measuring” or “assessing” step to identify, or determine the number or proportion of, cells in the test tissue sample that express PD-L1 (e.g., the expression of PD-L1 on the cell surface) is performed by a transformative method of assaying for PD-L1 expression, for example by performing a reverse transcriptase-polymerase chain reaction (RT-PCR) assay or an IHC assay. In certain other aspects, no transformative step is involved and PD-L1 expression is assessed by, for example, reviewing a report of test results from a laboratory. In certain aspects, the steps of the methods up to, and including, assessing PD-L1 expression provides an intermediate result that may be provided to a physician or other healthcare provider for use in selecting a suitable candidate for the anti-PD-1 antibody or anti-PD-L1 antibody therapy. In certain aspects, the steps that provide the intermediate result is performed by a medical practitioner or someone acting under the direction of a medical practitioner. In other aspects, these steps are performed by an independent laboratory or by an independent person such as a laboratory technician.

[0262] In certain aspects of any of the present methods, the proportion of cells that express PD-L1 is assessed by performing an assay to determine the presence of PD-L1 RNA. In further aspects, the presence of PD-L1 RNA is determined by RT-PCR, in situ hybridization or RNase protection. In other aspects, the proportion of cells that express PD-L1 is assessed by performing an assay to determine the presence of PD-L1 polypeptide. In further aspects, the presence of PD-L1 polypeptide is determined by immunohistochemistry (IHC), enzyme-linked immunosorbent assay (ELISA), in vivo imaging, or flow cytometry. In some aspects, PD-L1 expression is assayed by IHC. In other aspects of all of these methods, cell surface expression of PD-L1 is assayed using, e.g., IHC or in vivo imaging.

[0263] Imaging techniques have provided important tools in cancer research and treatment. Recent developments in molecular imaging systems, including positron emission tomography (PET), single-photon emission computed tomography (SPECT), fluorescence reflectance imaging (FRI), fluorescence-mediated tomography (FMT), bioluminescence imaging (BLI), laser-scanning confocal microscopy (LSCM), and multiphoton microscopy (MPM) will likely herald even greater use of these techniques in cancer research. Some of these molecular imaging systems allow clinicians to not only see where a tumor is located in the body, but also to visualize the expression and activity of specific molecules, cells, and biological processes that influence tumor behavior and/or responsiveness to therapeutic drugs (Condeelis and Weissleder, “In vivo imaging in cancer,” Cold Spring Harb. Perspect. Biol. 2(12):a003848 (2010)). Antibody specificity, coupled with the sensitivity and resolution of PET, makes immunoPET imaging particularly attractive for monitoring and assaying expression of antigens in tissue samples (McCabe and Wu, “Positive progress in immunoPET—not just a coincidence,” Cancer Biother. Radiopharm. 25(3):253-61 (2010); Olafsen et al., “ImmunoPET imaging of B-cell lymphoma using 124I-anti-CD20 scFv dimers (diabodies),” Protein Eng. Des. Sel. 23(4):243-9 (2010)). In certain aspects of any of the present methods, PD-L1 expression is assayed by immunoPET imaging. In certain aspects of any of the present methods, the proportion of cells in a test tissue sample that express PD-L1 is assessed by performing an assay to determine the presence of PD-L1 polypeptide on the surface of cells in the test tissue sample. In certain aspects, the test tissue sample is a FFPE tissue sample. In other aspects, the presence of PD-L1 polypeptide is determined by IHC assay. In further aspects, the IHC assay is performed using an automated process. In some aspects, the IHC assay is performed using an anti-PD-L1 monoclonal antibody to bind to the PD-L1 polypeptide.

[0264] In one aspect of the present methods, an automated IHC method is used to assay the expression of PD-L1 on the surface of cells in FFPE tissue specimens. This disclosure provides methods for detecting the presence of human PD-L1 antigen in a test tissue sample, or quantifying the level of human PD-L1 antigen or the proportion of cells in the sample that express the antigen, which methods comprise contacting the test sample, and a negative control sample, with a monoclonal antibody that specifically binds to human PD-L1, under conditions that allow for formation of a complex between the antibody or portion thereof and human PD-L1. In certain aspects, the test and control tissue samples are FFPE samples. The formation of a complex is then detected, wherein a difference in complex formation between the test sample and the negative control sample is indicative of the presence of human PD-L1 antigen in the sample. Various methods are used to quantify PD-L1 expression.

[0265] In a particular aspect, the automated IHC method comprises: (a) deparafinizing and rehydrating mounted tissue sections in an autostainer; (b) retrieving antigen using a decloaking chamber and pH 6 buffer, heated to 110° C. for 10 min; (c) setting up reagents on an autostainer; and (d) running the autostainer to include steps of neutralizing endogenous peroxidase in the tissue specimen; blocking non-specific protein-binding sites on the slides; incubating the slides with primary antibody; incubating with a postprimary blocking agent; incubating with NovoLink Polymer; adding a chromogen substrate and developing; and counterstaining with hematoxylin.

[0266] For assessing PD-L1 expression in tumor tissue samples, a pathologist examines the number of membrane PD-L1⁺⁺ tumor cells in each field under a microscope and mentally estimates the percentage of cells that are positive, then averages them to come to the final percentage. The different staining intensities are defined as 0/negative, 1+/weak, 2+/moderate, and 3+/strong. Typically, percentage values are first assigned to the 0 and 3+ buckets, and then the intermediate 1+ and 2+ intensities are considered. For highly heterogeneous tissues, the specimen is divided into zones, and each zone is scored separately and then combined into a single set of percentage values. The percentages of negative and positive cells for the different staining intensities are determined from each area and a median value is given to each zone. A final percentage value is given to the tissue for each staining intensity category: negative, 1+, 2+, and 3+. The sum of all staining intensities needs to be 100%. In one aspect, the threshold number of cells that needs to be PD-L1 positive is at least about 100, at least about 125, at least about 150, at least about 175, or at least about 200 cells. In certain aspects, the threshold number of cells that need to be PD-L1 positive is at least about 100 cells.

[0267] Staining is also assessed in tumor-infiltrating inflammatory cells such as macrophages and lymphocytes. In most cases macrophages serve as an internal positive control since staining is observed in a large proportion of macrophages. While not required to stain with 3+ intensity, an absence of staining of macrophages should be taken into account to rule out any technical failure. Macrophages and lymphocytes are assessed for plasma membrane staining and only recorded for all samples as being positive or negative for each cell category. Staining is also characterized according to an outside/inside tumor immune cell designation. “Inside” means the immune cell is within the tumor tissue and/or on the boundaries of the tumor region without being physically intercalated among the tumor cells. “Outside” means that there is no physical association with the tumor, the immune cells being found in the periphery associated with connective or any associated adjacent tissue.

[0268] In certain aspects of these scoring methods, the samples are scored by two pathologists operating independently, and the scores are subsequently consolidated. In certain other aspects, the identification of positive and negative cells is scored using appropriate software.

[0269] A histoscore (also described as H-score) is used as a more quantitative measure of the IHC data. The histoscore is calculated as follows:

Histoscore=[(% tumor×1(low intensity))+(% tumor×2(medium intensity))+(% tumor×3(high intensity)]

[0270] To determine the histoscore, the pathologist estimates the percentage of stained cells in each intensity category within a specimen. Because expression of most biomarkers is heterogeneous the histoscore is a truer representation of the overall expression. The final histoscore range is 0 (no expression) to 300 (maximum expression).

[0271] An alternative means of quantifying PD-L1 expression in a test tissue sample IHC is to determine the adjusted inflammation score (AIS) score defined as the density of inflammation multiplied by the percent PD-L1 expression by tumor-infiltrating inflammatory cells (Taube et al., “Colocalization of inflammatory response with B7-hl expression in human melanocytic lesions supports an adaptive resistance mechanism of immune escape,” Sci. Transl. Med. 4(127):127ra37 (2012)).

### III. Compositions of the Disclosure

[0272] Also within the scope of the present disclosure are pharmaceutical compositions comprising an anti-PD-1 antibody or an anti-PD-L1 antibody. In some aspects, the pharmaceutical compositions are formulated for subcutaneous administration according to a method disclosed herein. In some aspects, the pharmaceutical compositions are formulated such that they exhibit improved properties compared to the compositions without two antioxidants or at least one antioxidant. Therapeutic agents of the present disclosure can be constituted in a composition, e.g., a pharmaceutical composition containing an antibody and a pharmaceutically acceptable carrier. As used herein, a “pharmaceutically acceptable carrier” includes any and all solvents, dispersion media, coatings, antibacterial and antifungal agents, isotonic and absorption delaying agents, and the like that are physiologically compatible. Preferably, the carrier for a composition containing an antibody is suitable for intravenous, intramuscular, subcutaneous, parenteral, spinal or epidermal administration (e.g., by injection or infusion), whereas the carrier for a composition containing an antibody and/or a cytokine is suitable for non-parenteral, e.g., oral, administration. In certain aspects, the pharmaceutical composition does not comprise a hyaluronidase.

[0273] In some aspects, the pharmaceutical composition comprises at least about 10 mg/mL to at least about 500 mg/mL of the anti-PD-1 antibody or the anti-PD-L1 antibody. In some aspects, the pharmaceutical composition comprises at least about 10 mg/mL to at least about 500 mg/mL, at least about 10 mg/mL to at least about 400 mg/mL, at least about 10 mg/mL to at least about 300 mg/mL, at least about 10 mg/mL to at least about 250 mg/mL, at least about 10 mg/mL to at least about 200 mg/mL, at least about 10 mg/mL to at least about 190 mg/mL, at least about 10 mg/mL to at least about 180 mg/mL, at least about 10 mg/mL to at least about 170 mg/mL, at least about 10 mg/mL to at least about 160 mg/mL, at least about 10 mg/mL to at least about 150 mg/mL, at least about 20 mg/mL to at least about 500 mg/mL, at least about 20 mg/mL to at least about 400 mg/mL, at least about 20 mg/mL to at least about 300 mg/mL, at least about 20 mg/mL to at least about 250 mg/mL, at least about 20 mg/mL to at least about 200 mg/mL, at least about 20 mg/mL to at least about 190 mg/mL, at least about 20 mg/mL to at least about 180 mg/mL, at least about 20 mg/mL to at least about 170 mg/mL, at least about 20 mg/mL to at least about 160 mg/mL, at least about 20 mg/mL to at least about 150 mg/mL, at least about 50 mg/mL to at least about 200 mg/mL, at least about 100 mg/mL to at least about 200 mg/mL, at least about 150 mg/mL to at least about 200 mg/mL, at least about 135 mg/mL to at least about 180 mg/mL, at least about 100 mg/mL to at least about 200 mg/mL, at least about 150 mg/mL to at least about 200 mg/mL, at least about 100 mg/mL to at least about 130 mg/mL, or at least about 108 mg/mL to at least about 132 mg/mL of the anti-PD-1 antibody or the anti-PD-L1 antibody. In some aspects, the pharmaceutical composition comprises at least about 50 mg/mL of the anti-PD-1 antibody or the anti-PD-L1 antibody. In some aspects, the pharmaceutical composition comprises at least about 60 mg/mL of the anti-PD-1 antibody or the anti-PD-L1 antibody. In some aspects, the pharmaceutical composition comprises at least about 70 mg/mL of the anti-PD-1 antibody or the anti-PD-L1 antibody. In some aspects, the pharmaceutical composition comprises at least about 75 mg/mL of the anti-PD-1 antibody or the anti-PD-L1 antibody. In some aspects, the pharmaceutical composition comprises at least about 80 mg/mL of the anti-PD-1 antibody or the anti-PD-L1 antibody. In some aspects, the pharmaceutical composition comprises at least about 90 mg/mL of the anti-PD-1 antibody or the anti-PD-L1 antibody. In some aspects, the pharmaceutical composition comprises at least about 100 mg/mL of the anti-PD-1 antibody or the anti-PD-L1 antibody. In some aspects, the pharmaceutical composition comprises at least about 108 mg/mL of the anti-PD-1 antibody or the anti-PD-L1 antibody. In some aspects, the pharmaceutical composition comprises at least about 110 mg/mL of the anti-PD-1 antibody or the anti-PD-L1 antibody. In some aspects, the pharmaceutical composition comprises at least about 120 mg/mL of the anti-PD-1 antibody or the anti-PD-L1 antibody. In some aspects, the pharmaceutical composition comprises at least about 130 mg/mL of the anti-PD-1 antibody or the anti-PD-L1 antibody. In some aspects, the pharmaceutical composition comprises at least about 132 mg/mL of the anti-PD-1 antibody or the anti-PD-L1 antibody. In some aspects, the pharmaceutical composition comprises at least about 135 mg/mL of the anti-PD-1 antibody or the anti-PD-L1 antibody. In some aspects, the pharmaceutical composition comprises at least about 140 mg/mL of the anti-PD-1 antibody or the anti-PD-L1 antibody. In some aspects, the pharmaceutical composition comprises at least about 150 mg/mL of the anti-PD-1 antibody or the anti-PD-L1 antibody. In some aspects, the pharmaceutical composition comprises at least about 160 mg/mL of the anti-PD-1 antibody or the anti-PD-L1 antibody. In some aspects, the pharmaceutical composition comprises at least about 170 mg/mL of the anti-PD-1 antibody or the anti-PD-L1 antibody. In some aspects, the pharmaceutical composition comprises at least about 175 mg/mL of the anti-PD-1 antibody or the anti-PD-L1 antibody. In some aspects, the pharmaceutical composition comprises at least about 180 mg/mL of the anti-PD-1 antibody or the anti-PD-L1 antibody. In some aspects, the pharmaceutical composition comprises at least about 190 mg/mL of the anti-PD-1 antibody or the anti-PD-L1 antibody. In some aspects, the pharmaceutical composition comprises at least about 200 mg/mL of the anti-PD-1 antibody or the anti-PD-L1 antibody.

[0274] III.A. Endoglycosidase Hydrolase Enzyme

[0275] In some aspects, the pharmaceutical composition comprises an endoglycosidase hydrolase enzyme. In some aspects, the pharmaceutical composition comprises at least about 50 U/mL to at least about 48000 units of an endoglycosidase hydrolase enzyme (e.g., rHuPH20). In some aspects, the pharmaceutical composition comprises at least about 50 U/mL to at least about 5000 U/mL of an endoglycosidase hydrolase enzyme (e.g., rHuPH20). In some aspects, the pharmaceutical composition comprises at least about 50 U/mL, at least about 100 U/mL, at least about 150 U/mL, at least about 200 U/mL, at least about 250 U/mL, at least about 300 U/mL, at least about 350 U/mL, at least about 400 U/mL, at least about 450 U/mL, at least about 500 U/mL, at least about 750 U/mL, at least about 1000 U/mL, at least about 1500 U/mL, at least about 2000 U/mL, at least about 2500 U/mL, at least about 3000 U/mL, at least about 3500 U/mL, at least about 4000 U/mL, at least about 4500 U/mL, at least about 5000 U/mL, at least about 5500 U/mL, at least about 6000 U/mL, at least about 6500 U/mL, at least about 7000 U/mL, at least about 7500 U/mL, at least about 8000 U/mL, at least about 8500 U/mL, at least about 9000 U/mL, at least about 9500 U/mL, at least about 10,000 U/mL of an endoglycosidase hydrolase enzyme (e.g., rHuPH20). In some aspects, the pharmaceutical composition comprises at least about 500 U/mL of an endoglycosidase hydrolase enzyme (e.g., rHuPH20). In some aspects, the pharmaceutical composition comprises at least about 1000 U/mL of an endoglycosidase hydrolase enzyme (e.g., rHuPH20). In some aspects, the pharmaceutical composition comprises at least about 2000 U/mL of an endoglycosidase hydrolase enzyme (e.g., rHuPH20). In some aspects, the pharmaceutical composition comprises at least about 2500 U/mL of an endoglycosidase hydrolase enzyme (e.g., rHuPH20). In some aspects, the pharmaceutical composition comprises at least about 3000 U/mL of an endoglycosidase hydrolase enzyme (e.g., rHuPH20). In some aspects, the pharmaceutical composition comprises at least about 3500 U/mL of an endoglycosidase hydrolase enzyme (e.g., rHuPH20). In some aspects, the pharmaceutical composition comprises at least about 4000 U/mL of an endoglycosidase hydrolase enzyme (e.g., rHuPH20). In some aspects, the pharmaceutical composition comprises at least about 4500 U/mL of an endoglycosidase hydrolase enzyme (e.g., rHuPH20). In some aspects, the pharmaceutical composition comprises at least about 5000 U/mL of an endoglycosidase hydrolase enzyme (e.g., rHuPH20). In some aspects, the pharmaceutical composition comprises at least about 6000 U/mL of an endoglycosidase hydrolase enzyme (e.g., rHuPH20). In some aspects, the pharmaceutical composition comprises at least about 7000 U/mL of an endoglycosidase hydrolase enzyme (e.g., rHuPH20). In some aspects, the pharmaceutical composition comprises at least about 8000 U/mL of an endoglycosidase hydrolase enzyme (e.g., rHuPH20). In some aspects, the pharmaceutical composition comprises at least about 9000 U/mL of an endoglycosidase hydrolase enzyme (e.g., rHuPH20). In some aspects, the pharmaceutical composition comprises at least about 10,000 U/mL of an endoglycosidase hydrolase enzyme (e.g., rHuPH20).

[0276] In some aspects, the pharmaceutical composition comprises at least about 50 units to at least about 100,000 units of an endoglycosidase hydrolase enzyme (e.g., rHuPH20). In some aspects, the pharmaceutical composition comprises at least about 50 units, at least about 100 units, at least about 150 units, at least about 200 units, at least about 250 units, at least about 300 units, at least about 400 units, at least about 500 units, at least about 600 units, at least about 700 units, at least about 800 units, at least about 900 units, at least about 1000 units, at least about 1500 units, at least about 2000 units, at least about 2500 units, at least about 3000 units, at least about 4000 units, at least about 5000 units, at least about 10,000 units, at least about 15,000 units, at least about 20,000 units, at least about 25,000 units, at least about 30,000 units, at least about 35,000 units, at least about 40,000 units, at least about 45,000 units, at least about 48,000 units, at least about 50,000 units, at least about 55,000 units, at least about 60,000 units, at least about 65,000 units, at least about 70,000 units, at least about 75,000 units, at least about 80,000 units, at least about 85,000 units, at least about 90,000 units, at least about 95,000 units, or at least about 100,000 units of an endoglycosidase hydrolase enzyme (e.g., rHuPH20). In some aspects, the pharmaceutical composition comprises at least about 20,000 units of an endoglycosidase hydrolase enzyme (e.g., rHuPH20). In some aspects, the pharmaceutical composition comprises at least about 30,000 units of an endoglycosidase hydrolase enzyme (e.g., rHuPH20). In some aspects, the pharmaceutical composition comprises at least about 40,000 units of an endoglycosidase hydrolase enzyme (e.g., rHuPH20). In some aspects, the pharmaceutical composition comprises at least about 50,000 units of an endoglycosidase hydrolase enzyme (e.g., rHuPH20). In some aspects, the pharmaceutical composition comprises at least about 60,000 units of an endoglycosidase hydrolase enzyme (e.g., rHuPH20). In some aspects, the pharmaceutical composition comprises at least about 70,000 units of an endoglycosidase hydrolase enzyme (e.g., rHuPH20). In some aspects, the pharmaceutical composition comprises at least about 80,000 units of an endoglycosidase hydrolase enzyme (e.g., rHuPH20). In some aspects, the pharmaceutical composition comprises at least about 90,000 units of an endoglycosidase hydrolase enzyme (e.g., rHuPH20). In some aspects, the pharmaceutical composition comprises at least about 100,000 units of an endoglycosidase hydrolase enzyme (e.g., rHuPH20).

[0277] It would be readily apparent to a person of ordinary skill in the art that the amount of the endoglycosidase hydrolase enzyme (e.g., rHuPH20) can be expressed in terms of units or U/mL or the amount of the endoglycosidase hydrolase enzyme (e.g., rHuPH20) can be expressed in terms mg/mL (or in other weight-based units). For example, in some aspects, the pharmaceutical composition comprises an amount of an endoglycosidase hydrolase enzyme (e.g., rHuPH20) expressed as at least about 500 U/mL or at least about 0.00455 mg/mL. In another example, in some aspects, the pharmaceutical composition comprises an amount of an endoglycosidase hydrolase enzyme (e.g., rHuPH20) expressed as at least about 2000 U/mL or at least about 0.0182 mg/mL.

[0278] In certain aspects, the pharmaceutical composition comprises: (a) about 120 mg/mL of the anti-PD-1 antibody; (b) about 20 mM histidine; (c) about 250 mM sucrose; (d) about 0.05% w/v polysorbate 80; (e) about 50 μM pentetic acid; (f) about 5 mM methionine, and (g) about 2000 U/mL rHuPH20. In certain aspects, the pharmaceutical composition comprises: (a) about 120 mg/mL of nivolumab; (b) about 20 mM histidine; (c) about 250 mM sucrose; (d) about 0.05% w/v polysorbate 80; (e) about 50 μM pentetic acid; (f) about 5 mM methionine, and (g) about 2000 U/mL rHuPH20. In certain aspects, the pharmaceutical composition comprises: (a) about 120 mg/mL of the anti-PD-1 antibody; (b) about 20 mM histidine; (c) about 250 mM sucrose; (d) about 0.05% w/v polysorbate 80; (e) about 50 μM pentetic acid; (f) about 5 mM methionine, and (g) about 0.0182 mg/mL rHuPH20. In certain aspects, the pharmaceutical composition comprises: (a) about 120 mg/mL of nivolumab; (b) about 20 mM histidine; (c) about 250 mM sucrose; (d) about 0.05% w/v polysorbate 80; (e) about 50 μM pentetic acid; (f) about 5 mM methionine, and (g) about 0.0182 mg/mL rHuPH20.

[0279] In certain aspects, the pharmaceutical composition comprises: (a) about 150 mg/mL of the anti-PD-1 antibody; (b) about 20 mM histidine; (c) about 250 mM sucrose; (d) about 0.05% w/v polysorbate 80; (e) about 50 μM pentetic acid; (f) about 5 mM methionine, and (g) about 2000 U/mL rHuPH20. In certain aspects, the pharmaceutical composition comprises: (a) about 150 mg/mL of nivolumab; (b) about 20 mM histidine; (c) about 250 mM sucrose; (d) about 0.05% w/v polysorbate 80; (e) about 50 μM pentetic acid; (f) about 5 mM methionine, and (g) about 2000 U/mL rHuPH20. In certain aspects, the pharmaceutical composition comprises: (a) about 150 mg/mL of the anti-PD-1 antibody; (b) about 20 mM histidine; (c) about 250 mM sucrose; (d) about 0.05% w/v polysorbate 80; (e) about 50 μM pentetic acid; (f) about 5 mM methionine, and (g) about 0.0182 mg/mL rHuPH20. In certain aspects, the pharmaceutical composition comprises: (a) about 150 mg/mL of nivolumab; (b) about 20 mM histidine; (c) about 250 mM sucrose; (d) about 0.05% w/v polysorbate 80; (e) about 50 μM pentetic acid; (f) about 5 mM methionine, and (g) about 0.0182 mg/mL rHuPH20.

[0280] In certain aspects, a unit dose described herein comprises: (a) about 120 mg/mL of the anti-PD-1 antibody; (b) about 20 mM histidine; (c) about 250 mM sucrose; (d) about 0.05% w/v polysorbate 80; (e) about 50 μM pentetic acid; (f) about 5 mM methionine, and (g) about 2000 U/mL rHuPH20. In certain aspects, a unit dose described herein comprises: (a) about 120 mg/mL of nivolumab; (b) about 20 mM histidine; (c) about 250 mM sucrose; (d) about 0.05% w/v polysorbate 80; (e) about 50 μM pentetic acid; (f) about 5 mM methionine, and (g) about 2000 U/mL rHuPH20. In certain aspects, a unit dose described herein comprises: (a) about 120 mg/mL of the anti-PD-1 antibody; (b) about 20 mM histidine; (c) about 250 mM sucrose; (d) about 0.05% w/v polysorbate 80; (e) about 50 μM pentetic acid; (f) about 5 mM methionine, and (g) about 0.0182 mg/mL rHuPH20. In certain aspects, a unit dose described herein comprises: (a) about 120 mg/mL of nivolumab; (b) about 20 mM histidine; (c) about 250 mM sucrose; (d) about 0.05% w/v polysorbate 80; (e) about 50 μM pentetic acid; (f) about 5 mM methionine, and (g) about 0.0182 mg/mL rHuPH20.

[0281] In certain aspects, a unit dose described herein comprises: (a) about 150 mg/mL of the anti-PD-1 antibody; (b) about 20 mM histidine; (c) about 250 mM sucrose; (d) about 0.05% w/v polysorbate 80; (e) about 50 μM pentetic acid; (f) about 5 mM methionine, and (g) about 2000 U/mL rHuPH20. In certain aspects, a unit dose described herein comprises: (a) about 150 mg/mL of nivolumab; (b) about 20 mM histidine; (c) about 250 mM sucrose; (d) about 0.05% w/v polysorbate 80; (e) about 50 μM pentetic acid; (f) about 5 mM methionine, and (g) about 2000 U/mL rHuPH20. In certain aspects, a unit dose described herein comprises: (a) about 150 mg/mL of the anti-PD-1 antibody; (b) about 20 mM histidine; (c) about 250 mM sucrose; (d) about 0.05% w/v polysorbate 80; (e) about 50 μM pentetic acid; (f) about 5 mM methionine, and (g) about 0.0182 mg/mL rHuPH20. In certain aspects, a unit dose described herein comprises: (a) about 150 mg/mL of nivolumab; (b) about 20 mM histidine; (c) about 250 mM sucrose; (d) about 0.05% w/v polysorbate 80; (e) about 50 μM pentetic acid; (f) about 5 mM methionine, and (g) about 0.0182 mg/mL rHuPH20.

[0282] In certain aspects, the pharmaceutical composition comprises (a) about 672 mg nivolumab; (b) about 8.68 mg L-histidine; (c) about 11.8 mg histidine HCl H2O; (d) about 479 mg sucrose; (e) about 2.80 mg polysorbate 80; (f) about 0.110 mg pentetic acid; (g) about 4.18 mg methionine; (h) about 0.102 mg rHuPH20; wherein (a)-(h) are reconstituted in water to a final volume of at least about 5.6 mL.

[0283] III.B. Antioxidants

[0284] In some aspects, the pharmaceutical composition further comprises an antioxidant. Any antioxidant can be used in the pharmaceutical compositions disclosed herein. In some aspects, the antioxidant is selected from methionine, tryptophan, and histidine, cysteine, ascorbic acid, glycine, pentetic acid (DTPA), and EDTA. In certain aspects, the pharmaceutical composition comprises methionine. In some aspects, the pharmaceutical composition comprises at least two antioxidants. In some aspects, more than one antioxidants, e.g., two antioxidants, prevents oxidation of the formulation components and/or improves stability of the antibody. In some aspects, the at least two antioxidants comprise (i) methionine and EDTA or (ii) methionine and pentetic acid (DTPA).

[0285] In some aspects, the pharmaceutical composition comprises the anti-PD-1 antibody, methionine, and pentetic acid (DTPA). In some aspects, the pharmaceutical composition comprises from at least about 0.1 mM to at least about 100 mM methionine. In some aspects, the pharmaceutical compositions comprises at least about 1 mM, at least about 1.5 mM, at least about 2 mM, at least about 2.5 mM, at least about 3 mM, at least about 3.5 mM, at least about 4 mM, at least about 4.5 mM, at least about 5 mM, at least about 5.5 mM, at least about 6 mM, at least about 6.5 mM, at least about 7 mM, at least about 7.5 mM, at least about 8 mM, at least about 8.5 mM, at least about 9 mM, at least about 9.5 mM, or at least about 10 mM, at least about 11 mM, at least about 12 mM, at least about 13 mM, at least about 14 mM, at least about 15 mM, at least about 16 mM, at least about 17 mM, at least about 18 mM, at least about 19 mM, or at least about 20 mM methionine. In certain aspects, the pharmaceutical composition comprises at least about 10 mM methionine. In certain aspects, the pharmaceutical composition comprises at least about 9 mM methionine. In certain aspects, the pharmaceutical composition comprises at least about 8 mM methionine. In certain aspects, the pharmaceutical composition comprises at least about 7 mM methionine. In certain aspects, the pharmaceutical composition comprises at least about 6 mM methionine. In certain aspects, the pharmaceutical composition comprises at least about 5 mM methionine. In certain aspects, the pharmaceutical composition comprises at least about 4 mM methionine. In certain aspects, the pharmaceutical composition comprises at least about 3 mM methionine. In certain aspects, the pharmaceutical composition comprises at least about 2 mM methionine. In certain aspects, the pharmaceutical composition comprises at least about 1 mM methionine.

[0286] In some aspects, the pharmaceutical composition comprises from at least about 1 mM to at least about 250 mM pentetic acid (DTPA). In some aspects, the pharmaceutical composition comprises at least about 1 μM, at least about 5 μM, at least about 10 μM, at least about 15 μM, at least about 20 μM, at least about 25 μM, at least about 30 μM, at least about 35 μM, at least about 40 μM, at least about 45 μM, at least about 50 μM, at least about 55 μM, at least about 60 μM, at least about 65 μM, at least about 70 μM, at least about 75 μM, at least about 80 μM, at least about 85 μM, at least about 90 μM, at least about 95 μM, or at least about 100 μM, at least about 110 μM, at least about 120 μM, at least about 130 μM, at least about 140 μM, at least about 150 μM, at least about 160 μM, at least about 170 μM, at least about 180 μM, at least about 190 μM, or at least about 200 μM DTPA. In certain aspects, the pharmaceutical composition comprises at least about 75 μM pentetic acid (DTPA).In certain aspects, the pharmaceutical composition comprises at least about 70 μM pentetic acid (DTPA).In certain aspects, the pharmaceutical composition comprises at least about 65 μM pentetic acid (DTPA).In certain aspects, the pharmaceutical composition comprises at least about 60 μM pentetic acid (DTPA).In certain aspects, the pharmaceutical composition comprises at least about 55 μM pentetic acid (DTPA).In certain aspects, the pharmaceutical composition comprises at least about 50 μM pentetic acid (DTPA). In certain aspects, the pharmaceutical composition comprises at least about 45 μM pentetic acid (DTPA). In certain aspects, the pharmaceutical composition comprises at least about 40 μM pentetic acid (DTPA). In certain aspects, the pharmaceutical composition comprises at least about 35 μM pentetic acid (DTPA). In certain aspects, the pharmaceutical composition comprises at least about 30 μM pentetic acid (DTPA). In certain aspects, the pharmaceutical composition comprises at least about 25 μM pentetic acid (DTPA).

[0287] III.C. Tonicity Modifiers/Stabilizers

[0288] In some aspects, the pharmaceutical composition further comprises a tonicity modifier and/or stabilizer. Any tonicity modifier and/or any stabilizer can be used in the pharmaceutical compositions disclosed herein. In some aspects, the tonicity modifier and/or stabilizer comprises a sugar, an amino acid, a polyol, a salt, or any combination thereof. In some aspects, the tonicity modifier and/or stabilizer is selected from the group consisting of sucrose, sorbitol, trehalose, mannitol, glycerol, glycine, leucine, isoleucine, sodium chloride, proline, arginine, polyols, amino acids, and salts.

[0289] In certain aspects, the pharmaceutical composition comprises sucrose. In some aspects, the pharmaceutical composition comprises from at least about 1 mM to at least about 500 mM sucrose. In some aspects, the pharmaceutical compositions comprises from at least about 10 mM to at least about 400 mM, at least about 50 mM to at least about 400 mM, at least about 100 mM to at least about 400 mM, at least about 150 mM to at least about 400 mM, at least about 200 mM to at least about 400 mM, at least about 250 mM to at least about 400 mM, at least about 300 mM to at least about 400 mM, at least about 350 mM to at least about 400 mM, at least about 50 mM to at least about 350 mM, at least about 100 mM to at least about 300 mM, at least about 100 mM to at least about 250 mM, at least about 100 mM to at least about 200 mM, at least about 100 mM to at least about 150 mM, at least about 200 mM to at least about 400 mM, at least about 200 mM to at least about 300 mM sucrose, or at least about 200 mM to at least about 250 mM. In some aspects, the pharmaceutical compositions comprises at least about 10 mM, at least about 20 mM, at least about 30 mM, at least about 40 mM, at least about 50 mM, at least about 60 mM, at least about 70 mM, at least about 80 mM, at least about 90 mM, at least about 100 mM, at least about 110 mM, at least about 120 mM, at least about 130 mM, at least about 140 mM, at least about 150 mM, at least about 160 mM, at least about 170 mM, at least about 180 mM, at least about 190 mM, at least about 200 mM, at least about 210 mM, at least about 220 mM, at least about 230 mM, at least about 240 mM, at least about 250 mM, at least about 260 mM, at least about 270 mM, at least about 280 mM, at least about 290 mM, at least about 300 mM, at least about 310 mM, at least about 320 mM, at least about 330 mM, at least about 340 mM, at least about 350 mM, at least about 360 mM, at least about 370 mM, at least about 380 mM, at least about 390 mM, at least about 400 mM, at least about 410 mM, at least about 420 mM, at least about 430 mM, at least about 440 mM, at least about 450 mM, at least about 460 mM, at least about 470 mM, at least about 480 mM, at least about 490 mM, or at least about 500 mM sucrose. In certain aspects, the pharmaceutical composition comprises at least about 200 mM sucrose. In certain aspects, the pharmaceutical composition comprises at least about 210 mM sucrose. In certain aspects, the pharmaceutical composition comprises at least about 220 mM sucrose. In certain aspects, the pharmaceutical composition comprises at least about 230 mM sucrose. In certain aspects, the pharmaceutical composition comprises at least about 240 mM sucrose. In certain aspects, the pharmaceutical composition comprises at least about 250 mM sucrose. In certain aspects, the pharmaceutical composition comprises at least about 260 mM sucrose. In certain aspects, the pharmaceutical composition comprises at least about 270 mM sucrose. In certain aspects, the pharmaceutical composition comprises at least about 280 mM sucrose. In certain aspects, the pharmaceutical composition comprises at least about 290 mM sucrose. In certain aspects, the pharmaceutical composition comprises at least about 300 mM sucrose.

[0290] III.D. Buffering Agents

[0291] In some aspects, the pharmaceutical composition further comprises a buffering agent. In some aspects, the buffering agent is selected from histidine, succinate, tromethamine, sodium phosphate, sodium acetate, and sodium citrate. In certain aspects, the pharmaceutical composition comprises histidine. In certain aspects, the pharmaceutical composition comprises citrate. In some aspects, the pharmaceutical composition comprises from at least about 1 mM to at least about 100 mM histidine. In some aspects, the pharmaceutical composition comprises from at least about 5 mM to at least about 100 mM, at least about 10 mM to at least about 100 mM, at least about 15 mM to at least about 100 mM, at least about 20 mM to at least about 100 mM, at least about 25 mM to at least about 100 mM, at least about 30 mM to at least about 100 mM, at least about 35 mM to at least about 100 mM, at least about 40 mM to at least about 100 mM, at least about 45 mM to at least about 100 mM, at least about 50 mM to at least about 100 mM, at least about 10 mM to at least about 75 mM, at least about 10 mM to at least about 50 mM, at least about 10 mM to at least about 40 mM, at least about 10 mM to at least about 30 mM, at least about 15 mM to at least about 30 mM, at least about 10 mM to at least about 25 mM, or at least about 15 mM to at least about 25 mM, histidine.

[0292] In some aspects, the pharmaceutical composition comprises at least about 5 mM, at least about 10 mM, at least about 15 mM, at least about 20 mM, at least about 25 mM, at least about 30 mM, at least about 35 mM, at least about 40 mM, at least about 45 mM, at least about 50 mM, at least about 60 mM, at least about 70 mM, at least about 80 mM, at least about 90 mM, or at least about 100 mM histidine. In certain aspects, the pharmaceutical composition comprises at least about 10 mM histidine. In certain aspects, the pharmaceutical composition comprises at least about 15 mM histidine. In certain aspects, the pharmaceutical composition comprises at least about 20 mM histidine. In certain aspects, the pharmaceutical composition comprises at least about 25 mM histidine. In certain aspects, the pharmaceutical composition comprises at least about 30 mM histidine. In certain aspects, the pharmaceutical composition comprises at least about 35 mM histidine. In certain aspects, the pharmaceutical composition comprises at least about 40 mM histidine. In certain aspects, the pharmaceutical composition comprises at least about 45 mM histidine. In certain aspects, the pharmaceutical composition comprises at least about 50 mM histidine.

[0293] In some aspects, the pharmaceutical composition comprises a pH of about 5.2 to about 6.8. In some aspects, the pH of the pharmaceutical composition is about 5.2. In some aspects, the pH of the pharmaceutical composition is about 5.3. In some aspects, the pH of the pharmaceutical composition is about 5.4. In some aspects, the pH of the pharmaceutical composition is about 5.5. In some aspects, the pH of the pharmaceutical composition is about 5.6. In some aspects, the pH of the pharmaceutical composition is about 5.7. In some aspects, the pH of the pharmaceutical composition is about 5.8. In some aspects, the pH of the pharmaceutical composition is about 5.9. In some aspects, the pH of the pharmaceutical composition is about 6.0. In some aspects, the pH of the pharmaceutical composition is about 6.1. In some aspects, the pH of the pharmaceutical composition is about 6.2. In some aspects, the pH of the pharmaceutical composition is about 6.3. In some aspects, the pH of the pharmaceutical composition is about 6.4. In some aspects, the pH of the pharmaceutical composition is about 6.5. In some aspects, the pH of the pharmaceutical composition is about 6.6. In some aspects, the pH of the pharmaceutical composition is about 6.7. In some aspects, the pH of the pharmaceutical composition is about 6.8.

[0294] III.E. Surfactants

[0295] In some aspects, the pharmaceutical composition further comprises a surfactant. Any surfactant can be used in the pharmaceutical compositions disclosed herein. In some aspects, the surfactant is selected from the group consisting of polysorbate 20, polysorbate 80, and poloxamer 188. In certain aspects, the pharmaceutical composition comprises polysorbate 80. In some aspects, the pharmaceutical composition comprises from at least about 0.001% to at least about 1% w/v polysorbate 80. In some aspects, the pharmaceutical compositions comprises at least about 0.01% to at least about 0.1%, at least about 0.02% to at least about 0.1%, at least about 0.03% to at least about 0.1%, at least about 0.04% to at least about 0.1%, at least about 0.05% to at least about 0.1%, at least about 0.01% to at least about 0.09%, at least about 0.01% to at least about 0.8%, at least about 0.01% to at least about 0.7%, at least about 0.01% to at least about 0.6%, at least about 0.01% to at least about 0.5%, at least about 0.02% to at least about 0.09%, at least about 0.03% to at least about 0.08%, at least about 0.04% to at least about 0.07%, or at least about 0.04% to at least about 0.06% w/v polysorbate 80. In some aspects, the pharmaceutical compositions comprises at least about 0.01% to at least about 0.1% w/v polysorbate 80.

[0296] In some aspects, the pharmaceutical composition comprises at least about 0.01% w/v, at least about 0.02% w/v, at least about 0.03% w/v, at least about 0.04% w/v, at least about 0.05% w/v, at least about 0.06% w/v, at least about 0.07% w/v, at least about 0.08% w/v, at least about 0.09% w/v, or at least about 0.1% w/v polysorbate 80. In certain aspects, the pharmaceutical composition comprises at least about 0.03% w/v polysorbate 80. In certain aspects, the pharmaceutical composition comprises at least about 0.04% w/v polysorbate 80. In certain aspects, the pharmaceutical composition comprises at least about 0.05% w/v polysorbate 80. In certain aspects, the pharmaceutical composition comprises at least about 0.06% w/v polysorbate 80. In certain aspects, the pharmaceutical composition comprises at least about 0.07% w/v polysorbate 80.

[0297] In certain aspects, the pharmaceutical composition comprises: (a) about 120 mg/mL of the anti-PD-1 antibody; (b) about 20 mM histidine; (c) about 250 mM sucrose; (d) about 0.05% w/v polysorbate 80; (e) about 50 μM pentetic acid; and (f) about 5 mM methionine. In certain aspects, the pharmaceutical composition comprises: (a) about 120 mg/mL of nivolumab; (b) about 20 mM histidine; (c) about 250 mM sucrose; (d) about 0.05% w/v polysorbate 80; (e) about 50 μM pentetic acid; and (f) about 5 mM methionine.

[0298] In some aspects, the pharmaceutical composition comprises: (a) an anti-PD-1 antibody, e.g., nivolumab; (b) a checkpoint inhibitor, e.g., an anti-CTLA-4 antibody; (c) about 20 mM histidine; (d) about 250 mM sucrose; (e) about 0.05% w/v polysorbate 80; (f) about 50 μM pentetic acid; and (g) about 5 mM methionine. In some aspects, the pharmaceutical composition comprises: (a) an anti-PD-1 antibody, e.g., nivolumab; (b) a checkpoint inhibitor, e.g., an anti-CTLA-4 antibody; (c) about 20 mM histidine; (d) about 250 mM sucrose; (e) about 0.05% w/v polysorbate 80; (f) about 50 μM pentetic acid; (g) about 5 mM methionine; and (h) about 2000 U/mL rHuPH20.

[0299] In some aspects, the pharmaceutical composition comprises: (a) an anti-PD-1 antibody, e.g., nivolumab; (b) a checkpoint inhibitor, e.g., an anti-LAG-3 antibody; (c) about 20 mM histidine; (d) about 250 mM sucrose; (e) about 0.05% w/v polysorbate 80; (f) about 50 μM pentetic acid; and (g) about 5 mM methionine. In some aspects, the pharmaceutical composition comprises: (a) an anti-PD-1 antibody, e.g., nivolumab; (b) a checkpoint inhibitor, e.g., an anti-LAG-3 antibody; (c) about 20 mM histidine; (d) about 250 mM sucrose; (e) about 0.05% w/v polysorbate 80; (f) about 50 μM pentetic acid; (g) about 5 mM methionine; and (h) about 2000 U/mL rHuPH20.

[0300] In certain aspects, the pharmaceutical composition comprises: (a) about 150 mg/mL of the anti-PD-1 antibody; (b) about 20 mM histidine; (c) about 250 mM sucrose; (d) about 0.05% w/v polysorbate 80; (e) about 50 μM pentetic acid; and (f) about 5 mM methionine. In certain aspects, the pharmaceutical composition comprises: (a) about 150 mg/mL of the anti-PD-1 antibody; (b) about 20 mM histidine; (c) about 250 mM sucrose; (d) about 0.05% w/v polysorbate 80; (e) about 50 μM pentetic acid; (f) about 5 mM methionine; and (g) about 2000 U/mL rHuPH20. In certain aspects, the pharmaceutical composition comprises: (a) about 150 mg/mL of nivolumab; (b) about 20 mM histidine; (c) about 250 mM sucrose; (d) about 0.05% w/v polysorbate 80; (e) about 50 μM pentetic acid; and (f) about 5 mM methionine. In certain aspects, the pharmaceutical composition comprises: (a) about 150 mg/mL of nivolumab; (b) about 20 mM histidine; (c) about 250 mM sucrose; (d) about 0.05% w/v polysorbate 80; (e) about 50 μM pentetic acid; (f) about 5 mM methionine; and (g) about 2000 U/mL rHuPH20.

[0301] In certain aspects, a unit dose described herein comprises: (a) about 120 mg/mL of the anti-PD-1 antibody; (b) about 20 mM histidine; (c) about 250 mM sucrose; (d) about 0.05% w/v polysorbate 80; (e) about 50 μM pentetic acid; and (f) about 5 mM methionine. In certain aspects, a unit dose described herein comprises: (a) about 120 mg/mL of the anti-PD-1 antibody; (b) about 20 mM histidine; (c) about 250 mM sucrose; (d) about 0.05% w/v polysorbate 80; (e) about 50 μM pentetic acid; (f) about 5 mM methionine; and (g) about 2000 U/mL rHuPH20. In certain aspects, a unit dose described herein comprises: (a) about 120 mg/mL of nivolumab; (b) about 20 mM histidine; (c) about 250 mM sucrose; (d) about 0.05% w/v polysorbate 80; (e) about 50 μM pentetic acid; and (f) about 5 mM methionine. In certain aspects, a unit dose described herein comprises: (a) about 120 mg/mL of nivolumab; (b) about 20 mM histidine; (c) about 250 mM sucrose; (d) about 0.05% w/v polysorbate 80; (e) about 50 μM pentetic acid; (f) about 5 mM methionine; and (g) about 2000 U/mL rHuPH20.

[0302] In certain aspects, a unit dose described herein comprises: (a) about 150 mg/mL of the anti-PD-1 antibody; (b) about 20 mM histidine; (c) about 250 mM sucrose; (d) about 0.05% w/v polysorbate 80; (e) about 50 μM pentetic acid; and (f) about 5 mM methionine. In certain aspects, a unit dose described herein comprises: (a) about 150 mg/mL of the anti-PD-1 antibody; (b) about 20 mM histidine; (c) about 250 mM sucrose; (d) about 0.05% w/v polysorbate 80; (e) about 50 μM pentetic acid; (f) about 5 mM methionine; and (g) about 2000 U/mL rHuPH20. In certain aspects, a unit dose described herein comprises: (a) about 150 mg/mL of nivolumab; (b) about 20 mM histidine; (c) about 250 mM sucrose; (d) about 0.05% w/v polysorbate 80; (e) about 50 μM pentetic acid; and (f) about 5 mM methionine. In certain aspects, a unit dose described herein comprises: (a) about 150 mg/mL of nivolumab; (b) about 20 mM histidine; (c) about 250 mM sucrose; (d) about 0.05% w/v polysorbate 80; (e) about 50 μM pentetic acid; (f) about 5 mM methionine; and (g) about 2000 U/mL rHuPH20.

[0303] In certain aspects, the pharmaceutical composition comprises (a) about 672 mg nivolumab; (b) about 8.68 mg L-histidine; (c) about 11.8 mg histidine HCl H2O; (d) about 479 mg sucrose; (e) about 2.80 mg polysorbate 80; (f) about 0.110 mg pentetic acid; (g) about 4.18 mg methionine; wherein (a)-(g) are reconstituted in water (e.g., sterile water for injection, SWFI) to a final volume of at least about 5.6 mL.

[0304] III.F. Containers and Delivery Devices

[0305] Some aspects of the present disclosure are directed to a vial comprising a pharmaceutical composition disclosed herein. In some aspects, the vial comprises a unit dose of the pharmaceutical composition. In some aspects, the vial comprises (a) about 150 mg/mL of the anti-PD-1 antibody; (b) about 20 mM L-histidine; (c) about 250 mM sucrose; (d) about 0.05% w/v polysorbate 80; (e) about 50 μM pentetic acid; and (f) about 5 mM methionine. In some aspects, the vial does not comprise a hyaluronidase.

[0306] In some aspects, the vial is a syringe. Any syringe can be used in the compositions and methods disclosed herein. In some aspects, the syringe comprises one or more mechanical element that improves subcutaneous administration.

[0307] In some aspects, the vial is an autoinjector. Typically, an autoinjector works by the patient actuating the needle and subsequent flow of medication solely through the application of pressure on the injection site. The pressure causes the actuation of a needle shield, which engages the needle and causes the device to inject the drug. Accordingly, some aspects of the present disclosure are directed to an autoinjector comprising (a) about 150 mg/mL of the anti-PD-1 antibody; (b) about 20 mM L-histidine; (c) about 250 mM sucrose; (d) about 0.05% w/v polysorbate 80; (e) about 50 μM pentetic acid; and (f) about 5 mM methionine. In some aspects, the autoinjector does not comprise a hyaluronidase.

[0308] In some aspects, the vial is a pen injector. Standard pen injectors require the patient to activate a push-button, which actuates the needle into the targeted injection site. Accordingly, some aspects of the present disclosure are directed to an injection pen comprising (a) about 150 mg/mL of the anti-PD-1 antibody; (b) about 20 mM L-histidine; (c) about 250 mM sucrose; (d) about 0.05% w/v polysorbate 80; (e) about 50 μM pentetic acid; and (f) about 5 mM methionine. In some aspects, the injection pen does not comprise a hyaluronidase.

[0309] In some aspects, the vial is a wearable pump or a wearable device. In some aspects, the wearable pump is a patch pump. Accordingly, some aspects of the present disclosure are directed to a wearable pump comprising (a) about 150 mg/mL of the anti-PD-1 antibody; (b) about 20 mM L-histidine; (c) about 250 mM sucrose; (d) about 0.05% w/v polysorbate 80; (e) about 50 μM pentetic acid; and (f) about 5 mM methionine. In some aspects, the wearable pump does not comprise a hyaluronidase.

[0310] Some aspects of the present disclosure are directed to an autoinjector comprising (a) about 150 mg/mL of the anti-PD-1 antibody; (b) about 20 mM L-histidine; (c) about 250 mM sucrose; (d) about 0.05% w/v polysorbate 80; (e) about 50 μM pentetic acid; (f) about 5 mM methionine; and (g) about 0.0182 mg/mL rHuPH20.

[0311] In some aspects, the vial is a pen injector. Standard pen injectors require the patient to activate a push-button, which actuates the needle into the targeted injection site. Accordingly, some aspects of the present disclosure are directed to an injection pen comprising (a) about 150 mg/mL of the anti-PD-1 antibody; (b) about 20 mM L-histidine; (c) about 250 mM sucrose; (d) about 0.05% w/v polysorbate 80; (e) about 50 μM pentetic acid; (f) about 5 mM methionine; and (g) about 0.0182 mg/mL rHuPH20.

[0312] In some aspects, the vial is a wearable pump or a wearable device. In some aspects, the wearable pump is a patch pump. Accordingly, some aspects of the present disclosure are directed to a wearable pump comprising (a) about 150 mg/mL of the anti-PD-1 antibody; (b) about 20 mM L-histidine; (c) about 250 mM sucrose; (d) about 0.05% w/v polysorbate 80; (e) about 50 μM pentetic acid; (f) about 5 mM methionine; and (g) about 0.0182 mg/mL rHuPH20.

[0313] III.G. Additional Therapeutic Agents

[0314] In some aspects, the pharmaceutical composition further comprises a second therapeutic agent (e.g., an anti-PD-1 antibody and an additional therapeutic agent, or an anti-PD-L1 antibody and an additional therapeutic agent). In some aspects, the pharmaceutical composition further comprises a third therapeutica agent. The additional therapeutic agent can comprise any therapy for the treatment of a tumor in a subject and/or any standard-of-care therapy, as disclosed herein. In some aspects, the additional therapeutic agent comprises a second antibody. In some aspects, the additional therapeutic agent comprises an antibody or antigen-binding portion thereof that specifically binds CTLA-4, LAG-3, TIGIT, TIM3, NKG2a, OX40, ICOS, MICA, CD137, KIR, TGFβ, IL-10, IL-8, B7-H4, Fas ligand, CXCR4, mesothelin, CD27, GITR, or any combination thereof. In some aspects, the second therapeutic agent, the third therapeutic agent, or both comprises IL-2 (e.g., bempegaldesleukin). In some aspects, the second therapeutic agent, the third therapeutic agent, or both comprises IL 12-Fc (e.g., BMS-986415).

[0315] In some aspects, the antibody is a multispecific antibody. In some aspects, the antibody is a bispecific antibody. In some aspects, the antibody is a trispecific antibody. In some aspects, the antibody specifically binds (i) PD-1 and (ii) a second antigen. In some aspects, the antibody specifically binds (i) PD-1, (ii) a second antigen, and (iii) a third antigen. In some aspects, the antibody specifically binds (i) PD-L1 and (ii) a second antigen. In some aspects, the antibody specifically binds (i) PD-L1 (ii) a second antigen, and (iii) a third antigen. In some aspects, the second antigen and third antigen are the same. In some aspects, the second antigen and third antigen are different. In some aspects, the second antigen is CD3.

[0316] In some aspects, the antibody specifically binds (i) TIGIT and (ii) an inhibitory receptor expressed on T cells, NK cells, or both. In some aspects, the antibody specifically binds (i) CD40 and (ii) CD20.

[0317] In some aspects, the second antibody comprises an anti-CTLA-4 antibody. The anti-CTLA-4 antibody can be any antibody or an antigen-binding portion thereof that binds CTLA-4 and inhibits its activity. In some aspects, the anti-CTLA-4 antibody is any anti-CTLA-4 antibody disclosed herein. In some aspects, the second antibody comprises tremelimumab. In some aspects, the second antibody comprises ipilimumab.

[0318] In some aspects, the second antibody comprises an anti-LAG3 antibody. The anti-LAG3 antibody can be any antibody or an antigen-binding portion thereof that binds LAG-3 and inhibits its activity. In some aspects, the anti-LAG3 antibody comprises any anti-LAG3 antibody disclosed herein. In some aspects, the second antibody comprises 25F7.

[0319] In some aspects, the second antibody comprises an anti-CD137 antibody. The anti-CD137 antibody can be any antibody or an antigen-binding portion thereof that binds CD137 and inhibits its activity. In some aspects, the anti-CD137 antibody comprises any anti-CD137 antibody disclosed herein. In some aspects, the second antibody comprises urelumab.

[0320] In some aspects, the second antibody comprises an anti-KIR antibody. The anti-KIR antibody comprises any antibody or an antigen-binding portion thereof that binds KIR and inhibits its activity. In some aspects, the anti-KIR antibody comprises any anti-KIR antibody disclosed herein. In some aspects, the second antibody comprises lirilumab.

[0321] In some aspects, the second antibody comprises an anti-GITR antibody. The anti-GITR antibody can be any antibody or an antigen-binding portion thereof that binds GITR and inhibits its activity. In some aspects, the anti-GITR antibody comprises any anti-GITR antibody disclosed herein. In some aspects, the second antibody comprises MK4166. In some aspects, the second antibody comprises TRX518.

[0322] In some aspects, the second antibody comprises an anti-CD96 antibody. In some aspects, the second antibody comprises an anti-TIM3 antibody. In some aspects, the second antibody comprises an anti-VISTA antibody. In some aspects, the second antibody comprises an anti-NKG2a antibody. In some aspects, the second antibody comprises an anti-ICOS antibody. In some aspects, the second antibody comprises an anti-OX40 antibody. In some aspects, the second antibody comprises an anti-IL8 antibody, such as HuMax®-IL8 (BMS-986253).

[0323] III.G.1. Anti-CTLA-4 Antibodies

[0324] In some aspects, the second antibody comprises an anti-CTLA-4 antibody. Anti-CTLA-4 antibodies that are known in the art can be used in the compositions and methods of the present disclosure. Anti-CTLA-4 antibodies of the instant invention bind to human CTLA-4 so as to disrupt the interaction of CTLA-4 with a human B7 receptor. Because the interaction of CTLA-4 with B7 transduces a signal leading to inactivation of T-cells bearing the CTLA-4 receptor, disruption of the interaction effectively induces, enhances or prolongs the activation of such T cells, thereby inducing, enhancing or prolonging an immune response.

[0325] Human monoclonal antibodies that bind specifically to CTLA-4 with high affinity have been disclosed in U.S. Pat. No. 6,984,720. Other anti-CTLA-4 monoclonal antibodies have been described in, for example, U.S. Pat. Nos. 5,977,318, 6,051,227, 6,682,736, and 7,034,121 and International Publication Nos. WO 2012/122444, WO 2007/113648, WO 2016/196237, and WO 2000/037504, each of which is incorporated by reference herein in its entirety. The anti-CTLA-4 human monoclonal antibodies disclosed in U.S. Pat. No. 6,984,720 have been demonstrated to exhibit one or more of the following characteristics: (a) binds specifically to human CTLA-4 with a binding affinity reflected by an equilibrium association constant (Kₐ) of at least about 10⁷ M⁻¹, or about 10⁹ M⁻¹, or about 10¹⁰ M⁻¹ to 10¹¹ M⁻¹ or higher, as determined by Biacore analysis; (b) a kinetic association constant (kₐ) of at least about 10³, about 10⁴, or about 10⁵ m⁻¹ s⁻¹; (c) a kinetic disassociation constant (k_{d}) of at least about 10³, about 10⁴, or about 10⁵ m⁻¹ s⁻¹; and (d) inhibits the binding of CTLA-4 to B7-1 (CD80) and B7-2 (CD86). Anti-CTLA-4 antibodies useful for the present invention include monoclonal antibodies that bind specifically to human CTLA-4 and exhibit at least one, at least two, or at least three of the preceding characteristics.

[0326] In certain aspects, the CTLA-4 antibody is selected from the group consisting of ipilimumab (also known as YERVOY®, MDX-010, 10D1; see U.S. Pat. No. 6,984,720), MK-1308 (Merck), AGEN-1884 (Agenus Inc.; see WO 2016/196237), and tremelimumab (AstraZeneca; also known as ticilimumab, CP-675,206; see WO 2000/037504 and Ribas, Update Cancer Ther. 2(3): 133-39 (2007)). In particular aspects, the anti-CTLA-4 antibody is ipilimumab.

[0327] In particular aspects, the CTLA-4 antibody is ipilimumab for use in the compositions and methods disclosed herein. Ipilimumab is a fully human, IgG1 monoclonal antibody that blocks the binding of CTLA-4 to its B7 ligands, thereby stimulating T cell activation and improving overall survival (OS) in patients with advanced melanoma.

[0328] In particular aspects, the CTLA-4 antibody is tremelimumab. In particular aspects, the CTLA-4 antibody is MK-1308. In particular aspects, the CTLA-4 antibody is AGEN-1884.

[0329] In some aspects, the CTLA-4 antibody is nonfucosylated or hypofucosylated. In some aspects, the CTLA-4 antibody exhibits enhanced ADCC and/or ADCP activity. In some aspects, the CTLA-4 antibody is BMS-986218, as described in PCT/US18/19868.

[0330] Anti-CTLA-4 antibodies usable in the disclosed compositions and methods also include isolated antibodies that bind specifically to human CTLA-4 and cross-compete for binding to human CTLA-4 with any anti-CTLA-4 antibody disclosed herein, e.g., ipilimumab and/or tremelimumab. In some aspects, the anti-CTLA-4 antibody binds the same epitope as any of the anti-CTLA-4 antibodies described herein, e.g., ipilimumab and/or tremelimumab. The ability of antibodies to cross-compete for binding to an antigen indicates that these antibodies bind to the same epitope region of the antigen and sterically hinder the binding of other cross-competing antibodies to that particular epitope region. These cross-competing antibodies are expected to have functional properties very similar those of the reference antibody, e.g., ipilimumab and/or tremelimumab, by virtue of their binding to the same epitope region of CTLA-4. Cross-competing antibodies can be readily identified based on their ability to cross-compete with ipilimumab and/or tremelimumab in standard CTLA-4 binding assays such as Biacore analysis, ELISA assays or flow cytometry (see. e.g., WO 2013/173223).

[0331] In certain aspects, the antibodies that cross-compete for binding to human CTLA-4 with, or bind to the same epitope region of human CTLA-4 antibody as, ipilimumab and/or tremelimumab, are monoclonal antibodies. For administration to human subjects, these cross-competing antibodies are chimeric antibodies, engineered antibodies, or humanized or human antibodies. Such chimeric, engineered, humanized or human monoclonal antibodies can be prepared and isolated by methods well known in the art.

[0332] Anti-CTLA-4 antibodies usable in the compositions and methods of the disclosed invention also include antigen-binding portions of the above antibodies. It has been amply demonstrated that the antigen-binding function of an antibody can be performed by fragments of a full-length antibody.

[0333] In some aspects, an anti-CTLA-4 antibody can be formulated together with an anti-PD-1 antibody in any one of formulations disclosed herein as a single formulation. In certain aspects, the pharmaceutical composition comprises: (a) about 150 mg/mL of the anti-PD-1 antibody; (b) about 20 mM histidine; (c) about 250 mM sucrose; (d) about 0.05% w/v polysorbate 80; (e) about 50 μM pentetic acid; (f) about 5 mM methionine; and (g) an anti-CTLA-4 antibody. In certain aspects, the pharmaceutical composition comprises: (a) about 150 mg/mL of the anti-PD-1 antibody; (b) about 20 mM histidine; (c) about 250 mM sucrose; (d) about 0.05% w/v polysorbate 80; (e) about 50 μM pentetic acid; (f) about 5 mM methionine; (g) an anti-CTLA-4 antibody; and (h) about 2000 U/mL rHuPH20.

[0334] In certain aspects, the pharmaceutical composition comprises: (a) about 150 mg/mL of nivolumab; (b) about 20 mM histidine; (c) about 250 mM sucrose; (d) about 0.05% w/v polysorbate 80; (e) about 50 μM pentetic acid; (f) about 5 mM methionine; and (g) an anti-CTLA-4 antibody. In certain aspects, the pharmaceutical composition comprises: (a) about 150 mg/mL of nivolumab; (b) about 20 mM histidine; (c) about 250 mM sucrose; (d) about 0.05% w/v polysorbate 80; (e) about 50 μM pentetic acid; (f) about 5 mM methionine; (g) an anti-CTLA-4 antibody; and (h) about 2000 U/mL rHuPH20.

[0335] Anti-CTLA-4 antibodies suitable for use in the disclosed methods or compositions are antibodies that bind to CTLA-4 with high specificity and affinity, block the activity of CTLA-4, and disrupt the interaction of CTLA-4 with a human B7 receptor. In any of the compositions or methods disclosed herein, an anti-CTLA-4 “antibody” includes an antigen-binding portion or fragment that binds to CTLA-4 and exhibits the functional properties similar to those of whole antibodies in inhibiting the interaction of CTLA-4 with a human B7 receptor and up-regulating the immune system. In certain aspects, the anti-CTLA-4 antibody or antigen-binding portion thereof cross-competes with ipilimumab and/or tremelimumab for binding to human CTLA-4.

[0336] In some aspects, the antibody is a multispecific antibody, e.g., a bispecific antibody, that specifically (i) CTLA-4 and (ii) a second antigen. In some aspects, the antibody is a multispecific antibody, e.g., a bispecific antibody, that specifically (i) CTLA-4 and (ii) CD3.

[0337] III.G.2. Anti-LAG-3 Antibodies

[0338] In some aspects, the second antibody comprises an anti-LAG-3 antibody, e.g., relatlimab. Anti-LAG-3 antibodies of the instant disclosure bind to human LAG-3. Antibodies that bind to LAG-3 have been disclosed in Int'l Publ. No. WO/2015/042246 and U.S. Publ. Nos. 2014/0093511 and 2011/0150892, each of which is incorporated by reference herein in its entirety.

[0339] An exemplary LAG-3 antibody useful in the present disclosure is 25F7 (described in U.S. Publ. No. 2011/0150892). An additional exemplary LAG-3 antibody useful in the present disclosure is BMS-986016 (relatlimab). In some aspects, an anti-LAG-3 antibody useful in the present disclosure cross-competes with 25F7 or BMS-986016. In some aspects, an anti-LAG-3 antibody useful in the present disclosure binds to the same epitope as 25F7 or BMS-986016. In some aspects, an anti-LAG-3 antibody comprises six CDRs of 25F7 or BMS-986016.

[0340] Other art-recognized anti-LAG-3 antibodies that can be used in the methods and/or compositions of the disclosure include IMP731 (H5L7BW) described in US 2011/007023, MK-4280 (28G-10, favezelimab) described in WO2016028672 and U.S. Publication No. 2020/0055938, REGN3767 (fianlimab) described in Burova E, et al., J. Immunother. Cancer (2016); 4(Supp. 1):P195 and U.S. Pat. No. 10,358,495, humanized BAP050 described in WO2017/019894, GSK2831781, IMP-701 (LAG525; ieramilimab) described in U.S. Pat. No. 10,711,060 and U.S. Publ. No. 2020/0172617, aLAG3(0414), aLAG3(0416), Sym022, TSR-033, TSR-075, XmAb841 (previously XmAb22841), MGD013 (tebotelimab), BI754111, FS118, P 13B02-30, AVA-017, AGEN1746, R07247669, INCAGN02385, IBI-110, EMB-02, IBI-323, LBL-007, and ABL501. These and other anti-LAG-3 antibodies useful in the claimed invention can be found in, for example: U.S. Pat. No. 10,188,730, WO 2016/028672, WO 2017/106129, WO2017/062888, WO2009/044273, WO2018/069500, WO2016/126858, WO2014/179664, WO2016/200782, WO2015/200119, WO2017/019846, WO2017/198741, WO2017/220555, WO2017/220569, WO2018/071500, WO2017/015560, WO2017/025498, WO2017/087589, WO2017/087901, WO2018/083087, WO2017/149143, WO2017/219995, US2017/0260271, WO2017/086367, WO2017/086419, WO2018/034227, WO2018/185046, WO2018/185043, WO2018/217940, WO19/011306, WO2018/208868, WO2014/140180, WO2018/201096, WO2018/204374, and WO2019/018730. The contents of each of these references are incorporated by reference in their entirety.

[0341] Anti-LAG-3 antibodies that can be used in the methods and/or compositions of the disclosure also include isolated antibodies that bind specifically to human LAG-3 and cross-compete for binding to human LAG-3 with any anti-LAG-3 antibody disclosed herein, e.g., relatlimab. In some aspects, the anti-LAG-3 antibody binds the same epitope as any of the anti-LAG-3 antibodies described herein, e.g., relatlimab.

[0342] In some aspects, the antibodies that cross-compete for binding to human LAG-3 with, or bind to the same epitope region as, any anti-LAG-3 antibody disclosed herein, e.g., relatlimab, are monoclonal antibodies. For administration to human subjects, these cross-competing antibodies are chimeric antibodies, engineered antibodies, or humanized or human antibodies. Such chimeric, engineered, humanized or human monoclonal antibodies can be prepared and isolated by methods well known in the art.

[0343] The ability of antibodies to cross-compete for binding to an antigen indicates that the antibodies bind to the same epitope region of the antigen and sterically hinder the binding of other cross-competing antibodies to that particular epitope region. These cross-competing antibodies are expected to have functional properties very similar those of the reference antibody, e.g., relatlimab, by virtue of their binding to the same epitope region. Cross-competing antibodies can be readily identified based on their ability to cross-compete in standard binding assays such as Biacore analysis, ELISA assays or flow cytometry (see, e.g., WO 2013/173223).

[0344] Anti-LAG-3 antibodies that can be used in the methods and/or compositions of the disclosure also include antigen-binding portions of any of the above full-length antibodies. It has been amply demonstrated that the antigen-binding function of an antibody can be performed by fragments of a full-length antibody.

[0345] In some aspects, the anti-LAG-3 antibody is a full-length antibody.

[0346] In some aspects, the anti-LAG-3 antibody is a monoclonal, human, humanized, chimeric, or multispecific antibody. In some aspects, the multispecific antibody is a dual-affinity re-targeting antibody (DART), a DVD-Ig, or bispecific antibody.

[0347] In some aspects, the anti-LAG-3 antibody is a F(ab′)2 fragment, a Fab′ fragment, a Fab fragment, a Fv fragment, a scFv fragment, a dsFv fragment, a dAb fragment, or a single chain binding polypeptide.

[0348] In some aspects, the anti-LAG-3 antibody is BMS-986016 (relatlimab), IMP731 (H5L7BW), MK4280 (28G-10, favezelimab), REGN3767 (fianlimab), GSK2831781, humanized BAP050, IMP-701 (LAG525, ieramilimab), aLAG3(0414), aLAG3(0416), Sym022, TSR-033, TSR-075, XmAb841 (XmAb22841), MGD013 (tebotelimab), BI754111, FS 118, P 13B02-30, AVA-017, 25F7, AGEN1746, R07247669, INCAGN02385, IBI-110, EMB-02, IBI-323, LBL-007, ABL501, or comprises an antigen binding portion thereof.

[0349] In some aspects, the anti-LAG-3 antibody is relatlimab.

[0350] In some aspects, the anti-LAG-3 antibody is MGD013 (tebotelimab), which is a bispecific PD-1×LAG-3 DART.

[0351] In some aspects, the anti-LAG-3 antibody is REGN3767 (fianlimab).

[0352] In some aspects, the anti-LAG-3 antibody is LAG525 (ieramilimab).

[0353] In some aspects, the anti-LAG-3 antibody is MK4280 (favezelimab).

[0354] In some aspects, an anti-LAG-3 antibody can be formulated together with an anti-PD-1 antibody in any one of formulations disclosed herein as a single formulation. In certain aspects, the pharmaceutical composition comprises: (a) about 150 mg/mL of the anti-PD-1 antibody; (b) about 20 mM histidine; (c) about 250 mM sucrose; (d) about 0.05% w/v polysorbate 80; (e) about 50 μM pentetic acid; (f) about 5 mM methionine; and (g) an anti-LAG-3 antibody. In certain aspects, the pharmaceutical composition comprises: (a) about 150 mg/mL of the anti-PD-1 antibody; (b) about 20 mM histidine; (c) about 250 mM sucrose; (d) about 0.05% w/v polysorbate 80; (e) about 50 μM pentetic acid; (f) about 5 mM methionine; and (g) relatlimab. In certain aspects, the pharmaceutical composition comprises: (a) about 150 mg/mL of the anti-PD-1 antibody; (b) about 20 mM histidine; (c) about 250 mM sucrose; (d) about 0.05% w/v polysorbate 80; (e) about 50 μM pentetic acid; (f) about 5 mM methionine; (g) an anti-LAG-3 antibody; and (h) about 2000 U/mL rHuPH20. In certain aspects, the pharmaceutical composition comprises: (a) about 150 mg/mL of the anti-PD-1 antibody; (b) about 20 mM histidine; (c) about 250 mM sucrose; (d) about 0.05% w/v polysorbate 80; (e) about 50 μM pentetic acid; (f) about 5 mM methionine; (g) relatlimab; and (h) about 2000 U/mL rHuPH20.

[0355] In certain aspects, the pharmaceutical composition comprises: (a) about 150 mg/mL of nivolumab; (b) about 20 mM histidine; (c) about 250 mM sucrose; (d) about 0.05% w/v polysorbate 80; (e) about 50 μM pentetic acid; (f) about 5 mM methionine; and (g) an anti-LAG-3 antibody. In certain aspects, the pharmaceutical composition comprises: (a) about 150 mg/mL of nivolumab; (b) about 20 mM histidine; (c) about 250 mM sucrose; (d) about 0.05% w/v polysorbate 80; (e) about 50 μM pentetic acid; (f) about 5 mM methionine; and (g) relatlimab. In certain aspects, the pharmaceutical composition comprises: (a) about 150 mg/mL of nivolumab; (b) about 20 mM histidine; (c) about 250 mM sucrose; (d) about 0.05% w/v polysorbate 80; (e) about 50 μM pentetic acid; (f) about 5 mM methionine; (g) an anti-LAG-3 antibody; and (h) about 2000 U/mL rHuPH20. In certain aspects, the pharmaceutical composition comprises: (a) about 150 mg/mL of nivolumab; (b) about 20 mM histidine; (c) about 250 mM sucrose; (d) about 0.05% w/v polysorbate 80; (e) about 50 μM pentetic acid; (f) about 5 mM methionine; (g) relatlimab; and (h) about 2000 U/mL rHuPH20.

[0356] An exemplary LAG-3 antibody useful in the present disclosure is 25F7 (described in U.S. Publ. No. 2011/0150892). An additional exemplary LAG-3 antibody useful in the present disclosure is BMS-986016. In one aspect, an anti-LAG-3 antibody useful for the composition cross-competes with 25F7 or BMS-986016. In another aspect, an anti-LAG-3 antibody useful for the composition binds to the same epitope as 25F7 or BMS-986016. In other aspects, an anti-LAG-3 antibody comprises six CDRs of 25F7 or BMS-986016.

[0357] In some aspects, the antibody is a multispecific antibody, e.g., a bispecific antibody, that specifically (i) LAG-3 and (ii) a second antigen. In some aspects, the antibody is a multispecific antibody, e.g., a bispecific antibody, that specifically (i) LAG-3 and (ii) CD3.

[0358] III.G.3. Anti-CD137 Antibodies

[0359] In some aspects, the second antibody comprises an anti-CD137 antibody. Anti-CD137 antibodies specifically bind to and activate CD137-expressing immune cells, stimulating an immune response, in particular a cytotoxic T cell response, against tumor cells. Antibodies that bind to CD137 have been disclosed in U.S. Publ. No. 2005/0095244 and U.S. Pat. Nos. 7,288,638, 6,887,673, 7,214,493, 6,303,121, 6,569,997, 6,905,685, 6,355,476, 6,362,325, 6,974,863, and 6,210,669.

[0360] In some aspects, an anti-CD137 antibody can be formulated together with an anti-PD-1 antibody in any one of formulations disclosed herein as a single formulation. In certain aspects, the pharmaceutical composition comprises: (a) about 150 mg/mL of the anti-PD-1 antibody; (b) about 20 mM histidine; (c) about 250 mM sucrose; (d) about 0.05% w/v polysorbate 80; (e) about 50 μM pentetic acid; (f) about 5 mM methionine; and (g) an anti-CD137 antibody. In certain aspects, the pharmaceutical composition comprises: (a) about 150 mg/mL of the anti-PD-1 antibody; (b) about 20 mM histidine; (c) about 250 mM sucrose; (d) about 0.05% w/v polysorbate 80; (e) about 50 μM pentetic acid; (f) about 5 mM methionine; (g) an anti-CD137 antibody; and (h) about 2000 U/mL rHuPH20.

[0361] In certain aspects, the pharmaceutical composition comprises: (a) about 150 mg/mL of nivolumab; (b) about 20 mM histidine; (c) about 250 mM sucrose; (d) about 0.05% w/v polysorbate 80; (e) about 50 μM pentetic acid; (f) about 5 mM methionine; and (g) an anti-CD137 antibody. In certain aspects, the pharmaceutical composition comprises: (a) about 150 mg/mL of nivolumab; (b) about 20 mM histidine; (c) about 250 mM sucrose; (d) about 0.05% w/v polysorbate 80; (e) about 50 μM pentetic acid; (f) about 5 mM methionine; (g) an anti-CD137 antibody; and (h) about 2000 U/mL rHuPH20.

[0362] In some aspects, the anti-CD137 antibody is urelumab (BMS-663513), described in U.S. Pat. No. 7,288,638 (20H4.9-IgG4 [10C7 or BMS-663513]). In some aspects, the anti-CD137 antibody is BMS-663031 (20H4.9-IgG1), described in U.S. Pat. No. 7,288,638. In some aspects, the anti-CD137 antibody is 4E9 or BMS-554271, described in U.S. Pat. No. 6,887,673. In some aspects, the anti-CD137 antibody is an antibody disclosed in U.S. Pat. Nos. 7,214,493; 6,303,121; 6,569,997; 6,905,685; or 6,355,476. In some aspects, the anti-CD137 antibody is 1D8 or BMS-469492; 3H3 or BMS-469497; or 3E1, described in U.S. Pat. No. 6,362,325. In some aspects, the anti-CD137 antibody is an antibody disclosed in issued U.S. Pat. No. 6,974,863 (such as 53A2). In some aspects, the anti-CD137 antibody is an antibody disclosed in issued U.S. Pat. No. 6,210,669 (such as 1D8, 3B8, or 3E1). In some aspects, the antibody is Pfizer's PF-05082566 (PF-2566). In other aspects, an anti-CD137 antibody useful for the invention cross-competes with the anti-CD137 antibodies disclosed herein. In some aspects, an anti-CD137 antibody binds to the same epitope as the anti-CD137 antibody disclosed herein. In other aspects, an anti-CD137 antibody useful in the disclosure comprises six CDRs of the anti-CD137 antibodies disclosed herein.

[0363] In some aspects, the antibody is a multispecific antibody, e.g., a bispecific antibody, that specifically (i) CD137 and (ii) a second antigen. In some aspects, the antibody is a multispecific antibody, e.g., a bispecific antibody, that specifically (i) CD137 and (ii) CD3.

[0364] III.G.4. Anti-KIR Antibodies

[0365] In some aspects, the second antibody comprises an anti-KIR3 antibody. Antibodies that bind specifically to KIR block the interaction between Killer-cell immunoglobulin-like receptors (KIR) on NK cells with their ligands. Blocking these receptors facilitates activation of NK cells and, potentially, destruction of tumor cells by the latter. Examples of anti-KIR antibodies have been disclosed in Int'l Publ. Nos. WO/2014/055648, WO 2005/003168, WO 2005/009465, WO 2006/072625, WO 2006/072626, WO 2007/042573, WO 2008/084106, WO 2010/065939, WO 2012/071411 and WO/2012/160448.

[0366] In some aspects, an anti-KIR antibody can be formulated together with an anti-PD-1 antibody in any one of formulations disclosed herein as a single formulation. In certain aspects, the pharmaceutical composition comprises: (a) about 150 mg/mL of the anti-PD-1 antibody; (b) about 20 mM histidine; (c) about 250 mM sucrose; (d) about 0.05% w/v polysorbate 80; (e) about 50 μM pentetic acid; (f) about 5 mM methionine; and (g) an anti-KIR antibody. In certain aspects, the pharmaceutical composition comprises: (a) about 150 mg/mL of the anti-PD-1 antibody; (b) about 20 mM histidine; (c) about 250 mM sucrose; (d) about 0.05% w/v polysorbate 80; (e) about 50 μM pentetic acid; (f) about 5 mM methionine; (g) an anti-KIR antibody; and (h) about 2000 U/mL rHuPH20.

[0367] In certain aspects, the pharmaceutical composition comprises: (a) about 150 mg/mL of nivolumab; (b) about 20 mM histidine; (c) about 250 mM sucrose; (d) about 0.05% w/v polysorbate 80; (e) about 50 μM pentetic acid; (f) about 5 mM methionine; and (g) an anti-KIR antibody. In certain aspects, the pharmaceutical composition comprises: (a) about 150 mg/mL of nivolumab; (b) about 20 mM histidine; (c) about 250 mM sucrose; (d) about 0.05% w/v polysorbate 80; (e) about 50 μM pentetic acid; (f) about 5 mM methionine; (g) an anti-KIR antibody; and (h) about 2000 U/mL rHuPH20.

[0368] One anti-KIR antibody useful in the present disclosure is lirilumab (also referred to as BMS-986015, IPH2102, or the S241P variant of 1-7F9), first described in Int'l Publ. No. WO 2008/084106. An additional anti-KIR antibody useful in the present disclosure is 1-7F9 (also referred to as IPH2101), described in Int'l Publ. No. WO 2006/003179. In one aspect, an anti-KIR antibody for the present composition cross competes for binding to KIR with lirilumab or I-7F9. In another aspect, an anti-KIR antibody binds to the same epitope as lirilumab or I-7F9. In other aspects, an anti-KIR antibody comprises six CDRs of lirilumab or I-7F9.

[0369] In some aspects, the antibody is a multispecific antibody, e.g., a bispecific antibody, that specifically (i) KIR and (ii) a second antigen. In some aspects, the antibody is a multispecific antibody, e.g., a bispecific antibody, that specifically (i) KIR and (ii) CD3.

[0370] III.G.5. Anti-GITR Antibodies

[0371] In some aspects, the second antibody comprises an anti-GITR antibody. Anti-GITR antibodies comprises any anti-GITR antibody that binds specifically to human GITR target and activates the glucocorticoid-induced tumor necrosis factor receptor (GITR). GITR is a member of the TNF receptor superfamily that is expressed on the surface of multiple types of immune cells, including regulatory T cells, effector T cells, B cells, natural killer (NK) cells, and activated dendritic cells (“anti-GITR agonist antibodies”). Specifically, GITR activation increases the proliferation and function of effector T cells, as well as abrogating the suppression induced by activated T regulatory cells. In addition, GITR stimulation promotes anti-tumor immunity by increasing the activity of other immune cells such as NK cells, antigen presenting cells, and B cells. Examples of anti-GITR antibodies have been disclosed in Int'l Publ. Nos. WO/2015/031667, WO2015/184,099, WO2015/026,684, WO11/028683 and WO/2006/105021, U.S. Pat. Nos. 7,812,135 and 8,388,967 and U.S. Publ. Nos. 2009/0136494, 2014/0220002, 2013/0183321 and 2014/0348841.

[0372] In some aspects, an anti-GITR antibody can be formulated together with an anti-PD-1 antibody in any one of formulations disclosed herein as a single formulation. In certain aspects, the pharmaceutical composition comprises: (a) about 150 mg/mL of the anti-PD-1 antibody; (b) about 20 mM histidine; (c) about 250 mM sucrose; (d) about 0.05% w/v polysorbate 80; (e) about 50 μM pentetic acid; (f) about 5 mM methionine; and (g) an anti-GITR antibody. In certain aspects, the pharmaceutical composition comprises: (a) about 150 mg/mL of the anti-PD-1 antibody; (b) about 20 mM histidine; (c) about 250 mM sucrose; (d) about 0.05% w/v polysorbate 80; (e) about 50 μM pentetic acid; (f) about 5 mM methionine; (g) an anti-GITR antibody; and (h) about 2000 U/mL rHuPH20.

[0373] In certain aspects, the pharmaceutical composition comprises: (a) about 150 mg/mL of nivolumab; (b) about 20 mM histidine; (c) about 250 mM sucrose; (d) about 0.05% w/v polysorbate 80; (e) about 50 μM pentetic acid; (f) about 5 mM methionine; and (g) an anti-GITR antibody. In certain aspects, the pharmaceutical composition comprises: (a) about 150 mg/mL of nivolumab; (b) about 20 mM histidine; (c) about 250 mM sucrose; (d) about 0.05% w/v polysorbate 80; (e) about 50 μM pentetic acid; (f) about 5 mM methionine; (g) an anti-GITR antibody; and (h) about 2000 U/mL rHuPH20.

[0374] In one aspect, an anti-GITR antibody useful in the present disclosure is TRX518 (described in, for example, Schaer et al. Curr Opin Immunol. (2012) April; 24(2): 217-224, and WO/2006/105021). In another aspect, the anti-GITR antibody is selected from MK4166, MK1248, and antibodies described in WO11/028683 and U.S. Pat. No. 8,709,424, and comprising, e.g., a VH chain comprising SEQ ID NO: 104 and a VL chain comprising SEQ ID NO: 105 (wherein the SEQ ID NOs are from WO11/028683 or U.S. Pat. No. 8,709,424). In certain aspects, an anti-GITR antibody is an anti-GITR antibody that is disclosed in WO2015/031667, e.g., an antibody comprising VH CDRs 1-3 comprising SEQ ID NOs: 31, 71 and 63 of WO2015/031667, respectively, and VL CDRs 1-3 comprising SEQ ID NOs: 5, 14 and 30 of WO2015/031667. In certain aspects, an anti-GITR antibody is an anti-GITR antibody that is disclosed in WO2015/184099, e.g., antibody Hum231 #1 or Hum231 #2, or the CDRs thereof, or a derivative thereof (e.g., pab1967, pab1975 or pab1979). In certain aspects, an anti-GITR antibody is an anti-GITR antibody that is disclosed in JP2008278814, WO09/009116, WO2013/039954, US20140072566, US20140072565, US20140065152, or WO2015/026684, or is INBRX-110 (INHIBRx), LKZ-145 (Novartis), or MEDI-1873 (MedImmune). In certain aspects, an anti-GITR antibody is an anti-GITR antibody that is described in PCT/US2015/033991 (e.g., an antibody comprising the variable regions of 28F3, 18E10 or 19D3).

[0375] In certain aspects, the anti-GITR antibody cross-competes with an anti-GITR antibody described herein, e.g., TRX518, MK4166 or an antibody comprising a VH domain and a VL domain amino acid sequence described herein. In some aspects, the anti-GITR antibody binds the same epitope as that of an anti-GITR antibody described herein, e.g., TRX518, MK4166 or an antibody comprising a VH domain and a VL domain amino acid sequence described herein. In certain aspects, the anti-GITR antibody comprises the six CDRs of TRX518, MK4166 or those of an antibody comprising a VH domain and a VL domain amino acid sequence described herein.

[0376] In some aspects, the antibody is a multispecific antibody, e.g., a bispecific antibody, that specifically (i) GITR and (ii) a second antigen. In some aspects, the antibody is a multispecific antibody, e.g., a bispecific antibody, that specifically (i) GITR and (ii) CD3.

[0377] III.G.6. Anti-TIM3 Antibodies

[0378] In some aspects, the second antibody comprises an anti-TIM3 antibody. In some aspects, the anti-TIM3 antibody comprises selected from the anti-TIM3 antibodies disclosed in Int'l Publ. Nos. WO2018013818, WO/2015/117002 (e.g., MGB453, Novartis), WO/2016/161270 (e.g., TSR-022, Tesaro/AnaptysBio), WO2011155607, WO2016/144803 (e.g., STI-600, Sorrento Therapeutics), WO2016/071448, WO17055399; WO17055404, WO17178493, WO18036561, WO18039020 (e.g., Ly-3221367, Eli Lilly), WO2017205721, WO17079112; WO17079115; WO17079116, WO11159877, WO13006490, WO2016068802, WO2016068803, WO2016/111947, WO/2017/031242.

[0379] In some aspects, an anti-TIM3 antibody can be formulated together with an anti-PD-1 antibody in any one of formulations disclosed herein as a single formulation. In certain aspects, the pharmaceutical composition comprises: (a) about 150 mg/mL of the anti-PD-1 antibody; (b) about 20 mM histidine; (c) about 250 mM sucrose; (d) about 0.05% w/v polysorbate 80; (e) about 50 μM pentetic acid; (f) about 5 mM methionine; and (g) an anti-TIM3 antibody. In certain aspects, the pharmaceutical composition comprises: (a) about 150 mg/mL of the anti-PD-1 antibody; (b) about 20 mM histidine; (c) about 250 mM sucrose; (d) about 0.05% w/v polysorbate 80; (e) about 50 μM pentetic acid; (f) about 5 mM methionine; (g) an anti-TIM3 antibody; and (h) about 2000 U/mL rHuPH20.

[0380] In certain aspects, the pharmaceutical composition comprises: (a) about 150 mg/mL of nivolumab; (b) about 20 mM histidine; (c) about 250 mM sucrose; (d) about 0.05% w/v polysorbate 80; (e) about 50 μM pentetic acid; (f) about 5 mM methionine; and (g) an anti-TIM3 antibody. In certain aspects, the pharmaceutical composition comprises: (a) about 150 mg/mL of nivolumab; (b) about 20 mM histidine; (c) about 250 mM sucrose; (d) about 0.05% w/v polysorbate 80; (e) about 50 μM pentetic acid; (f) about 5 mM methionine; (g) an anti-TIM3 antibody; and (h) about 2000 U/mL rHuPH20.

[0381] In some aspects, the antibody is a multispecific antibody, e.g., a bispecific antibody, that specifically (i) TIM-3 and (ii) a second antigen. In some aspects, the antibody is a multispecific antibody, e.g., a bispecific antibody, that specifically (i) TIM-3 and (ii) CD3.

[0382] III.G.7. Anti-OX40 Antibodies

[0383] In some aspects, the second antibody comprises an anti-OX40 (also known as CD134, TNFRSF4, ACT35 and/or TXGP1L) antibody. In some aspects, the anti-OX40 antibody comprises BMS-986178 (Bristol-Myers Squibb Company), described in Int'l Publ. No. WO20160196228. In some aspects, the anti-OX40 antibody comprises selected from the anti-OX40 antibodies described in Int'l Publ. Nos. WO95012673, WO199942585, WO14148895, WO15153513, WO15153514, WO13038191, WO16057667, WO03106498, WO12027328, WO13028231, WO16200836, WO 17063162, WO17134292, WO 17096179, WO 17096281, and WO 17096182.

[0384] In some aspects, an anti-OX40 antibody can be formulated together with an anti-PD-1 antibody in any one of formulations disclosed herein as a single formulation. In certain aspects, the pharmaceutical composition comprises: (a) about 150 mg/mL of the anti-PD-1 antibody; (b) about 20 mM histidine; (c) about 250 mM sucrose; (d) about 0.05% w/v polysorbate 80; (e) about 50 μM pentetic acid; (f) about 5 mM methionine; and (g) an anti-OX40 antibody. In certain aspects, the pharmaceutical composition comprises: (a) about 150 mg/mL of the anti-PD-1 antibody; (b) about 20 mM histidine; (c) about 250 mM sucrose; (d) about 0.05% w/v polysorbate 80; (e) about 50 μM pentetic acid; (f) about 5 mM methionine; (g) an anti-OX40 antibody; and (h) about 2000 U/mL rHuPH20.

[0385] In certain aspects, the pharmaceutical composition comprises: (a) about 150 mg/mL of nivolumab; (b) about 20 mM histidine; (c) about 250 mM sucrose; (d) about 0.05% w/v polysorbate 80; (e) about 50 μM pentetic acid; (f) about 5 mM methionine; and (g) an anti-OX40 antibody. In certain aspects, the pharmaceutical composition comprises: (a) about 150 mg/mL of nivolumab; (b) about 20 mM histidine; (c) about 250 mM sucrose; (d) about 0.05% w/v polysorbate 80; (e) about 50 μM pentetic acid; (f) about 5 mM methionine; (g) an anti-OX40 antibody; and (h) about 2000 U/mL rHuPH20.

[0386] In some aspects, the antibody is a multispecific antibody, e.g., a bispecific antibody, that specifically (i) OX40 and (ii) a second antigen. In some aspects, the antibody is a multispecific antibody, e.g., a bispecific antibody, that specifically (i) OX40 and (ii) CD3.

[0387] III.G.8. Anti-NKG2A Antibodies

[0388] In some aspects, the second antibody comprises an anti-NKG2A antibody. NKG2A is a member of the C-type lectin receptor family that is expressed on natural killer (NK) cells and a subset of T lymphocytes. Specifically, NKG2A primarily expressed on tumor infiltrating innate immune effector NK cells, as well as on some CD8+ T cells. Its natural ligand human leukocyte antigen E (HLA-E) is expressed on solid and hematologic tumors. NKG2A is an inhibitory receptor that blinds HLA-E.

[0389] In some aspects, an anti-NKG2A antibody can be formulated together with an anti-PD-1 antibody in any one of formulations disclosed herein as a single formulation. In certain aspects, the pharmaceutical composition comprises: (a) about 150 mg/mL of the anti-PD-1 antibody; (b) about 20 mM histidine; (c) about 250 mM sucrose; (d) about 0.05% w/v polysorbate 80; (e) about 50 μM pentetic acid; (f) about 5 mM methionine; and (g) an anti-NKG2A antibody. In certain aspects, the pharmaceutical composition comprises: (a) about 150 mg/mL of the anti-PD-1 antibody; (b) about 20 mM histidine; (c) about 250 mM sucrose; (d) about 0.05% w/v polysorbate 80; (e) about 50 μM pentetic acid; (f) about 5 mM methionine; (g) an anti-NKG2A antibody; and (h) about 2000 U/mL rHuPH20.

[0390] In certain aspects, the pharmaceutical composition comprises: (a) about 150 mg/mL of nivolumab; (b) about 20 mM histidine; (c) about 250 mM sucrose; (d) about 0.05% w/v polysorbate 80; (e) about 50 μM pentetic acid; (f) about 5 mM methionine; and (g) an anti-NKG2A antibody. In certain aspects, the pharmaceutical composition comprises: (a) about 150 mg/mL of nivolumab; (b) about 20 mM histidine; (c) about 250 mM sucrose; (d) about 0.05% w/v polysorbate 80; (e) about 50 μM pentetic acid; (f) about 5 mM methionine; (g) an anti-NKG2A antibody; and (h) about 2000 U/mL rHuPH20.

[0391] In some aspects, the anti-NKG2A antibody comprises BMS-986315, a human monoclonal antibody that blocks the interaction of NKG2A to its ligand HLA-E, thus allowing activation of an anti-tumor immune response. In some aspects, the anti-NKG2A antibody comprises a checkpoint inhibitor that activates T cells, NK cells, and/or tumor-infiltrating immune cells. In some aspects, the anti-NKG2A antibody comprises selected from the anti-NKG2A antibodies described in, for example, WO 2006/070286 (Innate Pharma S.A.; University of Genova); U.S. Pat. No. 8,993,319 (Innate Pharma S.A.; University of Genova); WO 2007/042573 (Innate Pharma S/A; Novo Nordisk A/S; University of Genova); U.S. Pat. No. 9,447,185 (Innate Pharma S/A; Novo Nordisk A/S; University of Genova); WO 2008/009545 (Novo Nordisk A/S); U.S. Pat. Nos. 8,206,709; 8,901,283; 9,683,041 (Novo Nordisk A/S); WO 2009/092805 (Novo Nordisk A/S); U.S. Pat. Nos. 8,796,427 and 9,422,368 (Novo Nordisk A/S); WO 2016/134371 (Ohio State Innovation Foundation); WO 2016/032334 (Janssen); WO 2016/041947 (Innate); WO 2016/041945 (Academisch Ziekenhuis Leiden H.O.D.N. LUMC); WO 2016/041947 (Innate Pharma); and WO 2016/041945 (Innate Pharma).

[0392] In some aspects, the antibody is a multispecific antibody, e.g., a bispecific antibody, that specifically (i) NKG2A and (ii) a second antigen. In some aspects, the antibody is a multispecific antibody, e.g., a bispecific antibody, that specifically (i) NKG2A and (ii) CD3.

[0393] III.G.9. Anti-ICOS Antibodies

[0394] In some aspects, the second antibody comprises an anti-ICOS antibody. ICOS is an immune checkpoint protein that is a member of the CD28-superfamily. ICOS is a 55-60 kDa type I transmembrane protein that is expressed on T cells after T cell activation and co-stimulates T-cell activation after binding its ligand, ICOS-L (B7H2). ICOS is also known as inducible T-cell co-stimulator, CVID1, AILIM, inducible costimulator, CD278, activation-inducible lymphocyte immunomediatory molecule, and CD278 antigen.

[0395] In some aspects, an anti-ICOS antibody can be formulated together with an anti-PD-1 antibody in any one of formulations disclosed herein as a single formulation. In certain aspects, the pharmaceutical composition comprises: (a) about 150 mg/mL of the anti-PD-1 antibody; (b) about 20 mM histidine; (c) about 250 mM sucrose; (d) about 0.05% w/v polysorbate 80; (e) about 50 μM pentetic acid; (f) about 5 mM methionine; and (g) an anti-ICOS antibody. In certain aspects, the pharmaceutical composition comprises: (a) about 150 mg/mL of the anti-PD-1 antibody; (b) about 20 mM histidine; (c) about 250 mM sucrose; (d) about 0.05% w/v polysorbate 80; (e) about 50 μM pentetic acid; (f) about 5 mM methionine; (g) an anti-ICOS antibody; and (h) about 2000 U/mL rHuPH20.

[0396] In certain aspects, the pharmaceutical composition comprises: (a) about 150 mg/mL of nivolumab; (b) about 20 mM histidine; (c) about 250 mM sucrose; (d) about 0.05% w/v polysorbate 80; (e) about 50 μM pentetic acid; (f) about 5 mM methionine; and (g) an anti-ICOS antibody. In certain aspects, the pharmaceutical composition comprises: (a) about 150 mg/mL of nivolumab; (b) about 20 mM histidine; (c) about 250 mM sucrose; (d) about 0.05% w/v polysorbate 80; (e) about 50 μM pentetic acid; (f) about 5 mM methionine; (g) an anti-ICOS antibody; and (h) about 2000 U/mL rHuPH20.

[0397] In some aspects, the anti-ICOS antibody comprises BMS-986226, a humanized IgG monoclonal antibody that binds to and stimulates human ICOS. In some aspects, the anti-ICOS antibody comprises selected from anti-ICOS antibodies described in, for example, WO 2016/154177 (Jounce Therapeutics, Inc.), WO 2008/137915 (MedImmune), WO 2012/131004 (INSERM, French National Institute of Health and Medical Research), EP3147297 (INSERM, French National Institute of Health and Medical Research), WO 2011/041613 (Memorial Sloan Kettering Cancer Center), EP 2482849 (Memorial Sloan Kettering Cancer Center), WO 1999/15553 (Robert Koch Institute), U.S. Pat. Nos. 7,259,247 and 7,722,872 (Robert Kotch Institute); WO 1998/038216 (Japan Tobacco Inc.), U.S. Pat. Nos. 7,045,615; 7,112,655, and 8,389,690 (Japan Tobacco Inc.), U.S. Pat. Nos. 9,738,718 and 9,771,424 (GlaxoSmithKline), and WO 2017/220988 (Kymab Limited).

[0398] In some aspects, the antibody is a multispecific antibody, e.g., a bispecific antibody, that specifically (i) ICOS and (ii) a second antigen. In some aspects, the antibody is a multispecific antibody, e.g., a bispecific antibody, that specifically (i) ICOS and (ii) CD3.

[0399] III.G.10. Anti-TIGIT Antibodies

[0400] In some aspects, the second antibody comprises an anti-TIGIT antibody. In some aspects, the anti-TIGIT antibody comprises BMS-986207. In some aspects, the anti-TIGIT antibody comprises clone 22G2, as described in WO 2016/106302. In some aspects, the anti-TIGIT antibody comprises MTIG7192A/RG6058/RO7092284, or clone 4.1D3, as described in WO 2017/053748. In some aspects, the anti-TIGIT antibody comprises selected from the anti-TIGIT antibodies described in, for example, WO 2016/106302 (Bristol-Myers Squibb Company) and WO 2017/053748 (Genentech).

[0401] In some aspects, an anti-TIGIT antibody can be formulated together with an anti-PD-1 antibody in any one of formulations disclosed herein as a single formulation. In certain aspects, the pharmaceutical composition comprises: (a) about 150 mg/mL of the anti-PD-1 antibody; (b) about 20 mM histidine; (c) about 250 mM sucrose; (d) about 0.05% w/v polysorbate 80; (e) about 50 μM pentetic acid; (f) about 5 mM methionine; and (g) an anti-TIGIT antibody. In certain aspects, the pharmaceutical composition comprises: (a) about 150 mg/mL of the anti-PD-1 antibody; (b) about 20 mM histidine; (c) about 250 mM sucrose; (d) about 0.05% w/v polysorbate 80; (e) about 50 μM pentetic acid; (f) about 5 mM methionine; (g) an anti-TIGIT antibody; and (h) about 2000 U/mL rHuPH20.

[0402] In certain aspects, the pharmaceutical composition comprises: (a) about 150 mg/mL of nivolumab; (b) about 20 mM histidine; (c) about 250 mM sucrose; (d) about 0.05% w/v polysorbate 80; (e) about 50 μM pentetic acid; (f) about 5 mM methionine; and (g) an anti-TIM3 antibody. In certain aspects, the pharmaceutical composition comprises: (a) about 150 mg/mL of nivolumab; (b) about 20 mM histidine; (c) about 250 mM sucrose; (d) about 0.05% w/v polysorbate 80; (e) about 50 μM pentetic acid; (f) about 5 mM methionine; (g) an anti-TIGIT antibody; and (h) about 2000 U/mL rHuPH20.

[0403] In some aspects, the antibody is a multispecific antibody, e.g., a bispecific antibody, that specifically (i) TIGIT and (ii) a second antigen. In some aspects, the antibody comprises a TIGIT bispecific antibody, which specifically binds (i) TIGIT; and (ii) an inhibitory receptor expressed on T cells, NK cells, or both T cells and NK cells. In some aspects, the antibody is a multispecific antibody, e.g., a bispecific antibody, that specifically (i) TIGIT and (ii) CD3.

[0404] III.G.11. Anti-IL-12 Antibodies

[0405] In some aspects, the second antibody comprises an anti-IL-12 antibody. In certain aspects, the pharmaceutical composition comprises: (a) an anti-IL-12 antibody; (b) about 20 mM histidine; (c) about 250 mM sucrose; (d) about 0.05% w/v polysorbate 80; (e) about 50 μM pentetic acid; and (f) about 5 mM methionine. In certain aspects, the pharmaceutical composition comprises: (a) an anti-IL-12 antibody; (b) about 20 mM histidine; (c) about 250 mM sucrose; (d) about 0.05% w/v polysorbate 80; (e) about 50 μM pentetic acid; (f) about 5 mM methionine; and (g) about 2000 U/mL rHuPH20.

[0406] In some aspects, an anti-IL-12 antibody can be formulated together with an anti-PD-1 antibody in any one of formulations disclosed herein as a single formulation. In certain aspects, the pharmaceutical composition comprises: (a) about 150 mg/mL of the anti-PD-1 antibody; (b) about 20 mM histidine; (c) about 250 mM sucrose; (d) about 0.05% w/v polysorbate 80; (e) about 50 μM pentetic acid; (f) about 5 mM methionine; and (g) an anti-IL-12 antibody. In certain aspects, the pharmaceutical composition comprises: (a) about 150 mg/mL of the anti-PD-1 antibody; (b) about 20 mM histidine; (c) about 250 mM sucrose; (d) about 0.05% w/v polysorbate 80; (e) about 50 μM pentetic acid; (f) about 5 mM methionine; (g) an anti-IL-12 antibody; and (h) about 2000 U/mL rHuPH20.

[0407] In certain aspects, the pharmaceutical composition comprises: (a) about 150 mg/mL of nivolumab; (b) about 20 mM histidine; (c) about 250 mM sucrose; (d) about 0.05% w/v polysorbate 80; (e) about 50 μM pentetic acid; (f) about 5 mM methionine; and (g) an anti-IL-12 antibody. In certain aspects, the pharmaceutical composition comprises: (a) about 150 mg/mL of nivolumab; (b) about 20 mM histidine; (c) about 250 mM sucrose; (d) about 0.05% w/v polysorbate 80; (e) about 50 μM pentetic acid; (f) about 5 mM methionine; (g) an anti-IL-12 antibody; and (h) about 2000 U/mL rHuPH20.

[0408] In some aspects, the antibody is a multispecific antibody, e.g., a bispecific antibody, that specifically (i) IL-12 and (ii) a second antigen. In some aspects, the antibody is a multispecific antibody, e.g., a bispecific antibody, that specifically (i) IL-12 and (ii) CD3.

[0409] III.G.12. Anti-IL-13 Antibodies

[0410] In some aspects, the second antibody comprises an anti-IL-13 antibody. In certain aspects, the pharmaceutical composition comprises: (a) an anti-IL-13 antibody; (b) about 20 mM histidine; (c) about 250 mM sucrose; (d) about 0.05% w/v polysorbate 80; (e) about 50 μM pentetic acid; and (f) about 5 mM methionine. In certain aspects, the pharmaceutical composition comprises: (a) an anti-IL-13 antibody; (b) about 20 mM histidine; (c) about 250 mM sucrose; (d) about 0.05% w/v polysorbate 80; (e) about 50 μM pentetic acid; (f) about 5 mM methionine; and (g) about 2000 U/mL rHuPH20.

[0411] In some aspects, an anti-IL-13 antibody can be formulated together with an anti-PD-1 antibody in any one of formulations disclosed herein as a single formulation. In certain aspects, the pharmaceutical composition comprises: (a) about 150 mg/mL of the anti-PD-1 antibody; (b) about 20 mM histidine; (c) about 250 mM sucrose; (d) about 0.05% w/v polysorbate 80; (e) about 50 μM pentetic acid; (f) about 5 mM methionine; and (g) an anti-IL-13 antibody. In certain aspects, the pharmaceutical composition comprises: (a) about 150 mg/mL of the anti-PD-1 antibody; (b) about 20 mM histidine; (c) about 250 mM sucrose; (d) about 0.05% w/v polysorbate 80; (e) about 50 μM pentetic acid; (f) about 5 mM methionine; (g) an anti-IL-13 antibody; and (h) about 2000 U/mL rHuPH20.

[0412] In certain aspects, the pharmaceutical composition comprises: (a) about 150 mg/mL of nivolumab; (b) about 20 mM histidine; (c) about 250 mM sucrose; (d) about 0.05% w/v polysorbate 80; (e) about 50 μM pentetic acid; (f) about 5 mM methionine; and (g) an anti-IL-13 antibody. In certain aspects, the pharmaceutical composition comprises: (a) about 150 mg/mL of nivolumab; (b) about 20 mM histidine; (c) about 250 mM sucrose; (d) about 0.05% w/v polysorbate 80; (e) about 50 μM pentetic acid; (f) about 5 mM methionine; (g) an anti-IL-13 antibody; and (h) about 2000 U/mL rHuPH20.

[0413] In some aspects, the antibody is a multispecific antibody, e.g., a bispecific antibody, that specifically (i) IL-13 and (ii) a second antigen. In some aspects, the antibody is a multispecific antibody, e.g., a bispecific antibody, that specifically (i) IL-13 and (ii) CD3.

[0414] III.G.13. Anti-IL-15 Antibodies

[0415] In some aspects, the second antibody comprises an anti-IL-15 antibody. In certain aspects, the pharmaceutical composition comprises: (a) an anti-IL-15 antibody; (b) about 20 mM histidine; (c) about 250 mM sucrose; (d) about 0.05% w/v polysorbate 80; (e) about 50 μM pentetic acid; and (f) about 5 mM methionine. In certain aspects, the pharmaceutical composition comprises: (a) an anti-IL-15 antibody; (b) about 20 mM histidine; (c) about 250 mM sucrose; (d) about 0.05% w/v polysorbate 80; (e) about 50 μM pentetic acid; (f) about 5 mM methionine; and (g) about 2000 U/mL rHuPH20.

[0416] In some aspects, an anti-IL-15 antibody can be formulated together with an anti-PD-1 antibody in any one of formulations disclosed herein as a single formulation. In certain aspects, the pharmaceutical composition comprises: (a) about 150 mg/mL of the anti-PD-1 antibody; (b) about 20 mM histidine; (c) about 250 mM sucrose; (d) about 0.05% w/v polysorbate 80; (e) about 50 μM pentetic acid; (f) about 5 mM methionine; and (g) an anti-IL-15 antibody. In certain aspects, the pharmaceutical composition comprises: (a) about 150 mg/mL of the anti-PD-1 antibody; (b) about 20 mM histidine; (c) about 250 mM sucrose; (d) about 0.05% w/v polysorbate 80; (e) about 50 μM pentetic acid; (f) about 5 mM methionine; (g) an anti-IL-15 antibody; and (h) about 2000 U/mL rHuPH20.

[0417] In certain aspects, the pharmaceutical composition comprises: (a) about 150 mg/mL of nivolumab; (b) about 20 mM histidine; (c) about 250 mM sucrose; (d) about 0.05% w/v polysorbate 80; (e) about 50 μM pentetic acid; (f) about 5 mM methionine; and (g) an anti-IL-15 antibody. In certain aspects, the pharmaceutical composition comprises: (a) about 150 mg/mL of nivolumab; (b) about 20 mM histidine; (c) about 250 mM sucrose; (d) about 0.05% w/v polysorbate 80; (e) about 50 μM pentetic acid; (f) about 5 mM methionine; (g) an anti-IL-15 antibody; and (h) about 2000 U/mL rHuPH20.

[0418] In some aspects, the antibody is a multispecific antibody, e.g., a bispecific antibody, that specifically (i) IL-15 and (ii) a second antigen. In some aspects, the antibody is a multispecific antibody, e.g., a bispecific antibody, that specifically (i) IL-15 and (ii) CD3.

[0419] III.G.14. Anti-SIRPalpha Antibodies

[0420] In some aspects, the second antibody comprises an anti-SIRPalpha antibody. In certain aspects, the pharmaceutical composition comprises: (a) an anti-SIRPalpha antibody; (b) about 20 mM histidine; (c) about 250 mM sucrose; (d) about 0.05% w/v polysorbate 80; (e) about 50 μM pentetic acid; and (f) about 5 mM methionine. In certain aspects, the pharmaceutical composition comprises: (a) an anti-SIRPalpha antibody; (b) about 20 mM histidine; (c) about 250 mM sucrose; (d) about 0.05% w/v polysorbate 80; (e) about 50 μM pentetic acid; (f) about 5 mM methionine; and (g) about 2000 U/mL rHuPH20.

[0421] In some aspects, an anti-SIRPalpha antibody can be formulated together with an anti-PD-1 antibody in any one of formulations disclosed herein as a single formulation. In certain aspects, the pharmaceutical composition comprises: (a) about 150 mg/mL of the anti-PD-1 antibody; (b) about 20 mM histidine; (c) about 250 mM sucrose; (d) about 0.05% w/v polysorbate 80; (e) about 50 μM pentetic acid; (f) about 5 mM methionine; and (g) an anti-SIRPalpha antibody. In certain aspects, the pharmaceutical composition comprises: (a) about 150 mg/mL of the anti-PD-1 antibody; (b) about 20 mM histidine; (c) about 250 mM sucrose; (d) about 0.05% w/v polysorbate 80; (e) about 50 μM pentetic acid; (f) about 5 mM methionine; (g) an anti-SIRPalpha antibody; and (h) about 2000 U/mL rHuPH20.

[0422] In certain aspects, the pharmaceutical composition comprises: (a) about 150 mg/mL of nivolumab; (b) about 20 mM histidine; (c) about 250 mM sucrose; (d) about 0.05% w/v polysorbate 80; (e) about 50 μM pentetic acid; (f) about 5 mM methionine; and (g) an anti-SIRPalpha antibody. In certain aspects, the pharmaceutical composition comprises: (a) about 150 mg/mL of nivolumab; (b) about 20 mM histidine; (c) about 250 mM sucrose; (d) about 0.05% w/v polysorbate 80; (e) about 50 μM pentetic acid; (f) about 5 mM methionine; (g) an anti-SIRPalpha antibody; and (h) about 2000 U/mL rHuPH20.

[0423] In some aspects, the antibody is a multispecific antibody, e.g., a bispecific antibody, that specifically (i) SIRPalpha and (ii) a second antigen. In some aspects, the antibody is a multispecific antibody, e.g., a bispecific antibody, that specifically (i) SIRPalpha and (ii) CD3.

[0424] III.G.15. Anti-CD47 Antibodies

[0425] In some aspects, the second antibody comprises an anti-CD47 antibody. In certain aspects, the pharmaceutical composition comprises: (a) an anti-CD47 antibody; (b) about 20 mM histidine; (c) about 250 mM sucrose; (d) about 0.05% w/v polysorbate 80; (e) about 50 μM pentetic acid; and (f) about 5 mM methionine. In certain aspects, the pharmaceutical composition comprises: (a) an anti-CD47 antibody; (b) about 20 mM histidine; (c) about 250 mM sucrose; (d) about 0.05% w/v polysorbate 80; (e) about 50 μM pentetic acid; (f) about 5 mM methionine; and (g) about 2000 U/mL rHuPH20.

[0426] In some aspects, an anti-CD47 antibody can be formulated together with an anti-PD-1 antibody in any one of formulations disclosed herein as a single formulation. In certain aspects, the pharmaceutical composition comprises: (a) about 150 mg/mL of the anti-PD-1 antibody; (b) about 20 mM histidine; (c) about 250 mM sucrose; (d) about 0.05% w/v polysorbate 80; (e) about 50 μM pentetic acid; (f) about 5 mM methionine; and (g) an anti-CD47 antibody. In certain aspects, the pharmaceutical composition comprises: (a) about 150 mg/mL of the anti-PD-1 antibody; (b) about 20 mM histidine; (c) about 250 mM sucrose; (d) about 0.05% w/v polysorbate 80; (e) about 50 μM pentetic acid; (f) about 5 mM methionine; (g) an anti-CD47 antibody; and (h) about 2000 U/mL rHuPH20.

[0427] In certain aspects, the pharmaceutical composition comprises: (a) about 150 mg/mL of nivolumab; (b) about 20 mM histidine; (c) about 250 mM sucrose; (d) about 0.05% w/v polysorbate 80; (e) about 50 μM pentetic acid; (f) about 5 mM methionine; and (g) an anti-CD47 antibody. In certain aspects, the pharmaceutical composition comprises: (a) about 150 mg/mL of nivolumab; (b) about 20 mM histidine; (c) about 250 mM sucrose; (d) about 0.05% w/v polysorbate 80; (e) about 50 μM pentetic acid; (f) about 5 mM methionine; (g) an anti-CD47 antibody; and (h) about 2000 U/mL rHuPH20.

[0428] In some aspects, the antibody is a multispecific antibody, e.g., a bispecific antibody, that specifically (i) CD47 and (ii) a second antigen. In some aspects, the antibody is a multispecific antibody, e.g., a bispecific antibody, that specifically (i) CD47 and (ii) CD3.

[0429] III.G.16. Anti-CCR8 Antibodies

[0430] In some aspects, the second antibody comprises an anti-CCR8 antibody. In certain aspects, the pharmaceutical composition comprises: (a) an anti-CCR8 antibody; (b) about 20 mM histidine; (c) about 250 mM sucrose; (d) about 0.05% w/v polysorbate 80; (e) about 50 μM pentetic acid; and (f) about 5 mM methionine. In certain aspects, the pharmaceutical composition comprises: (a) an anti-CCR8 antibody; (b) about 20 mM histidine; (c) about 250 mM sucrose; (d) about 0.05% w/v polysorbate 80; (e) about 50 μM pentetic acid; (f) about 5 mM methionine; and (g) about 2000 U/mL rHuPH20.

[0431] In some aspects, an anti-CCR8 antibody can be formulated together with an anti-PD-1 antibody in any one of formulations disclosed herein as a single formulation. In certain aspects, the pharmaceutical composition comprises: (a) about 150 mg/mL of the anti-PD-1 antibody; (b) about 20 mM histidine; (c) about 250 mM sucrose; (d) about 0.05% w/v polysorbate 80; (e) about 50 μM pentetic acid; (f) about 5 mM methionine; and (g) an anti-CCR8 antibody. In certain aspects, the pharmaceutical composition comprises: (a) about 150 mg/mL of the anti-PD-1 antibody; (b) about 20 mM histidine; (c) about 250 mM sucrose; (d) about 0.05% w/v polysorbate 80; (e) about 50 μM pentetic acid; (f) about 5 mM methionine; (g) an anti-CCR8 antibody; and (h) about 2000 U/mL rHuPH20.

[0432] In certain aspects, the pharmaceutical composition comprises: (a) about 150 mg/mL of nivolumab; (b) about 20 mM histidine; (c) about 250 mM sucrose; (d) about 0.05% w/v polysorbate 80; (e) about 50 μM pentetic acid; (f) about 5 mM methionine; and (g) an anti-CCR8 antibody. In certain aspects, the pharmaceutical composition comprises: (a) about 150 mg/mL of nivolumab; (b) about 20 mM histidine; (c) about 250 mM sucrose; (d) about 0.05% w/v polysorbate 80; (e) about 50 μM pentetic acid; (f) about 5 mM methionine; (g) an anti-CCR8 antibody; and (h) about 2000 U/mL rHuPH20.

[0433] In some aspects, the antibody is a multispecific antibody, e.g., a bispecific antibody, that specifically (i) CCR8 and (ii) a second antigen. In some aspects, the antibody is a multispecific antibody, e.g., a bispecific antibody, that specifically (i) CCR8 and (ii) CD3.

[0434] III.G.17. Anti-MICA Antibodies

[0435] In some aspects, the second antibody comprises an anti-MICA antibody. In certain aspects, the pharmaceutical composition comprises: (a) an anti-MICA antibody; (b) about 20 mM histidine; (c) about 250 mM sucrose; (d) about 0.05% w/v polysorbate 80; (e) about 50 μM pentetic acid; and (f) about 5 mM methionine. In certain aspects, the pharmaceutical composition comprises: (a) an anti-MICA antibody; (b) about 20 mM histidine; (c) about 250 mM sucrose; (d) about 0.05% w/v polysorbate 80; (e) about 50 μM pentetic acid; (f) about 5 mM methionine; and (g) about 2000 U/mL rHuPH20.

[0436] In some aspects, an anti-MICA antibody can be formulated together with an anti-PD-1 antibody in any one of formulations disclosed herein as a single formulation. In certain aspects, the pharmaceutical composition comprises: (a) about 150 mg/mL of the anti-PD-1 antibody; (b) about 20 mM histidine; (c) about 250 mM sucrose; (d) about 0.05% w/v polysorbate 80; (e) about 50 μM pentetic acid; (f) about 5 mM methionine; and (g) an anti-MICA antibody. In certain aspects, the pharmaceutical composition comprises: (a) about 150 mg/mL of the anti-PD-1 antibody; (b) about 20 mM histidine; (c) about 250 mM sucrose; (d) about 0.05% w/v polysorbate 80; (e) about 50 μM pentetic acid; (f) about 5 mM methionine; (g) an anti-MICA antibody; and (h) about 2000 U/mL rHuPH20.

[0437] In certain aspects, the pharmaceutical composition comprises: (a) about 150 mg/mL of nivolumab; (b) about 20 mM histidine; (c) about 250 mM sucrose; (d) about 0.05% w/v polysorbate 80; (e) about 50 μM pentetic acid; (f) about 5 mM methionine; and (g) an anti-MICA antibody. In certain aspects, the pharmaceutical composition comprises: (a) about 150 mg/mL of nivolumab; (b) about 20 mM histidine; (c) about 250 mM sucrose; (d) about 0.05% w/v polysorbate 80; (e) about 50 μM pentetic acid; (f) about 5 mM methionine; (g) an anti-MICA antibody; and (h) about 2000 U/mL rHuPH20.

[0438] In some aspects, the antibody is a multispecific antibody, e.g., a bispecific antibody, that specifically (i) MICA and (ii) a second antigen. In some aspects, the antibody is a multispecific antibody, e.g., a bispecific antibody, that specifically (i) MICA and (ii) CD3.

[0439] III.G.18. Anti-ILT4 Antibodies

[0440] In some aspects, the second antibody comprises an anti-ILT4 antibody. In certain aspects, the pharmaceutical composition comprises: (a) an anti-ILT4 antibody; (b) about 20 mM histidine; (c) about 250 mM sucrose; (d) about 0.05% w/v polysorbate 80; (e) about 50 μM pentetic acid; and (f) about 5 mM methionine. In certain aspects, the pharmaceutical composition comprises: (a) an anti-ILT4 antibody; (b) about 20 mM histidine; (c) about 250 mM sucrose; (d) about 0.05% w/v polysorbate 80; (e) about 50 μM pentetic acid; (f) about 5 mM methionine; and (g) about 2000 U/mL rHuPH20.

[0441] In some aspects, an anti-ILT4 antibody can be formulated together with an anti-PD-1 antibody in any one of formulations disclosed herein as a single formulation. In certain aspects, the pharmaceutical composition comprises: (a) about 150 mg/mL of the anti-PD-1 antibody; (b) about 20 mM histidine; (c) about 250 mM sucrose; (d) about 0.05% w/v polysorbate 80; (e) about 50 μM pentetic acid; (f) about 5 mM methionine; and (g) an anti-ILT4 antibody. In certain aspects, the pharmaceutical composition comprises: (a) about 150 mg/mL of the anti-PD-1 antibody; (b) about 20 mM histidine; (c) about 250 mM sucrose; (d) about 0.05% w/v polysorbate 80; (e) about 50 μM pentetic acid; (f) about 5 mM methionine; (g) an anti-ILT4 antibody; and (h) about 2000 U/mL rHuPH20.

[0442] In certain aspects, the pharmaceutical composition comprises: (a) about 150 mg/mL of nivolumab; (b) about 20 mM histidine; (c) about 250 mM sucrose; (d) about 0.05% w/v polysorbate 80; (e) about 50 μM pentetic acid; (f) about 5 mM methionine; and (g) an anti-ILT4 antibody. In certain aspects, the pharmaceutical composition comprises: (a) about 150 mg/mL of nivolumab; (b) about 20 mM histidine; (c) about 250 mM sucrose; (d) about 0.05% w/v polysorbate 80; (e) about 50 μM pentetic acid; (f) about 5 mM methionine; (g) an anti-ILT4 antibody; and (h) about 2000 U/mL rHuPH20.

[0443] In some aspects, the antibody is a multispecific antibody, e.g., a bispecific antibody, that specifically (i) ILT4 and (ii) a second antigen. In some aspects, the antibody is a multispecific antibody, e.g., a bispecific antibody, that specifically (i) ILT4 and (ii) CD3.

[0444] III.G.19. Additional Anti-Cancer Agents

[0445] In some aspects, the pharmaceutical composition disclosed herein comprises (i) an anti-PD-1 or an anti-PD-L1 antibody and (ii) an anti-IL-10 antibody. In some aspects, the pharmaceutical composition disclosed herein comprises (i) an anti-PD-1 or an anti-PD-L1 antibody and (ii) a long-acting IL-10 molecule. In some aspects, the long-acting IL-10 molecule comprises an IL-10-Fc fusion molecule. In some aspects, the long-acting IL-10 molecule comprises a Pegylated IL-10, such as AM0010 (ARMO BioSciences).

[0446] In some aspects, the pharmaceutical composition disclosed herein comprises (i) an anti-PD-1 or an anti-PD-L1 antibody and (ii) an anti-IL-2 antibody. In some aspects, the pharmaceutical composition disclosed herein comprises (i) an anti-PD-1 or an anti-PD-L1 antibody and (ii) a long-acting IL-2 molecule. In some aspects, the long-acting IL-2 comprises a Pegylated IL-2, such as NKTR-214 (Nektar; see U.S. Pat. No. 8,252,275, WO12/065086 and WO15/125159).

[0447] In some aspects, the pharmaceutical composition disclosed herein comprises (i) an anti-PD-1 or an anti-PD-L1 antibody and (ii) an anti-VISTA antibody.

[0448] In some aspects, the pharmaceutical composition disclosed herein comprises (i) an anti-PD-1 or an anti-PD-L1 antibody and (ii) an anti-CD96 antibody.

[0449] In some aspects, the pharmaceutical composition disclosed herein comprises (i) an anti-PD-1 or an anti-PD-L1 antibody and (ii) an anti-IL-8 antibody, e.g., with HuMax®-IL8.

[0450] In some aspects, the pharmaceutical composition disclosed herein comprises (i) an anti-PD-1 or an anti-PD-L1 antibody and (ii) an anti-TGFβ antibody.

[0451] In some aspects, the pharmaceutical composition disclosed herein comprises (i) an anti-PD-1 or an anti-PD-L1 antibody and (ii) an anti-B7-H4 antibody. In certain aspects, the anti-B7-H4 antibody is an anti-B7-H4 disclosed in Int'l Publ. No. WO/2009/073533.

[0452] In some aspects, the pharmaceutical composition disclosed herein comprises (i) an anti-PD-1 or an anti-PD-L1 antibody and (ii) an anti-Fas ligand antibody. In certain aspects, the anti-Fas ligand antibody is an anti-Fas ligand disclosed in Int'l Publ. No. WO/2009/073533.

[0453] In some aspects, the pharmaceutical composition disclosed herein comprises (i) an anti-PD-1 or an anti-PD-L1 antibody and (ii) an anti-CXCR4 antibody. In certain aspects, the anti-CXCR4 antibody is an anti-CXCR4 disclosed in U.S. Publ. No. 2014/0322208 (e.g., Ulocuplumab (BMS-936564)).

[0454] In some aspects, the pharmaceutical composition disclosed herein comprises (i) an anti-PD-1 or an anti-PD-L1 antibody and (ii) an anti-mesothelin antibody. In certain aspects, the anti-mesothelin antibody is an anti-mesothelin disclosed in U.S. Pat. No. 8,399,623.

[0455] In some aspects, the pharmaceutical composition disclosed herein comprises (i) an anti-PD-1 or an anti-PD-L1 antibody and (ii) an anti-HER2 antibody. In certain aspects, the anti-HER2 antibody is Herceptin (U.S. Pat. No. 5,821,337), trastuzumab, or ado-trastuzumab emtansine (Kadcyla, e.g., WO/2001/000244).

[0456] In some aspects, the pharmaceutical composition disclosed herein comprises (i) an anti-PD-1 or an anti-PD-L1 antibody and (ii) an anti-CD27 antibody. In some aspects, the anti-CD-27 antibody is Varlilumab (also known as “CDX-1127” and “1F5”), which is a human IgG1 antibody that is an agonist for human CD27, as disclosed in, for example, U.S. Pat. No. 9,169,325.

[0457] In some aspects, the pharmaceutical composition disclosed herein comprises (i) an anti-PD-1 or an anti-PD-L1 antibody and (ii) an anti-CD73 antibody. In certain aspects, the anti-CD73 antibody is CD73.4.IgG2C219S.IgG1.1f.

[0458] In some aspects, the pharmaceutical composition disclosed herein comprises (i) an anti-PD-1 or an anti-PD-L1 antibody and (ii) an anti-MICA/B antibody. In certain aspects, the anti-MICA/B antibody is any antibody or antigen-binding portion thereof that specifically binds human MICA/B, including but not limited to, any anti-MICA/B antibody disclosed in International Publication No. WO 2019/183551, which is incorporated by reference herein in its entirety.

[0459] All of the references cited above, as well as all references cited herein, are incorporated herein by reference in their entireties.

[0460] The following examples are offered by way of illustration and not by way of limitation.

### EXAMPLES

### Example 1—Subcutaneous Injection Formulation Development

[0461] The present example discusses the development of a stable, robust subcutaneous (SC) formulation of nivolumab and a manufacturing process suitable for commercial scale production. As a part of the formulation studies, the effects of various different pharmaceutically acceptable excipients on the stability of nivolumab were evaluated. Studies were also undertaken to select processing and packaging components compatible with the selected formulation. In addition, use time studies were conducted to support administration of the drug product via subcutaneous injection.

[0462] The objectives of these studies conducted for the development of nivolumab SC injection include: 1. identification and development of a stable injectable formulation for nivolumab SC injection that would be suitable for clinical use and eventual commercialization; 2. identification of manufacturing equipment and packaging components that are compatible with nivolumab SC injection; 3. development and optimization of the process used for manufacture of the drug product; 4. manufacture of three batches of nivolumab SC injection for use in long-term stability studies and Phase 3 clinical trials; and 5. transfer of technology for product manufacture to a commercial production facility and manufacture PPQ batches.

[0463] Formulation Development

[0464] Selection of Buffer System and pH

[0465] Previous studies related to the development of an intravenous (IV) formulation for nivolumab evaluated protein stability as a function of solution pH using capillary differential scanning calorimetry (DSC), which measures the thermodynamics of protein unfolding; and further evaluated the physical stability of nivolumab in buffers that would be appropriate for formulation at pH 6.0 and 7.0. Based on the results of the two studies, 20 mM citrate buffer at pH 6.0 was selected for the IV formulation of nivolumab.

[0466] Although citrate proved to be a suitable buffer for the IV nivolumab drug product, citrate would not be a preferred buffer for a subcutaneously administered product as, citrate buffer is known to cause stinging and burning upon SC administration.

[0467] In an effort to identify other buffers with a target pH of 6.0 suitable for use in an SC formulation, a study was conducted to examine the stability of high concentration (100 mg/mL) nivolumab in a 20 mM histidine buffered formulation at pH values ranging from 5.5 to 6.5. Stability data for samples stored at the stress condition of 40° C. are presented in Table 2. Although rate of formation of high molecular weight species was relatively consistent across the pH range, after two months of storage at 40° C., the level of HMWS was lowest in the pH 6.0 samples. It was also observed that the main peak area by iCIEF was highest for the samples at pH 6.0. Based on the results of these studies, 20 mM histidine buffer at a target pH of 6.0, was selected for the formulation of nivolumab SC injection.

TABLE 2
Effect of Solution pH on the Stability Nivolumab SC Injection Stored for 2 Months
at 40° C.

| | | | | | | | Subvisible Particulate | |
|---|---|---|---|---|---|---|---|---|
| | | | Protein | | | Main Peak | Matter (Particles per | |
| | Time | | Conc. | HMWS | LMWS | Area % by | Milliliter) | |
| pH | (Months) | pH | (mg/mL) | Area % | Area % | iCIEF | ≥10-μm | ≥25-μm |
| 5.5 | 0 | 5.51 | 102 | 0.65 | 0.00 | 67.0 | 1 | 0 |
| | 1 | 5.49 | 100 | 1.38 | 0.08 | 48.9 | 1 | 0 |
| | 2 | 5.51 | 99 | 2.49 | 0.17 | 27.7 | 5 | 0 |
| 5.7 | 0 | 5.72 | 101 | 0.68 | 0.00 | 66.6 | 3 | 0 |
| | 1 | 5.71 | 99 | 1.32 | 0.07 | 50.3 | 0 | 0 |
| | 2 | 5.73 | 97 | 2.29 | 0.15 | 29.6 | 1 | 0 |
| 6.0 | 0 | 5.96 | 101 | 0.72 | 0.00 | 66.1 | 3 | 0 |
| | 1 | 5.97 | 102 | 1.34 | 0.06 | 49.7 | 1 | 0 |
| | 2 | 5.96 | 103 | 2.16 | 0.12 | 31.8 | 8 | 0 |
| 6.3 | 0 | 6.29 | 102 | 0.76 | 0.00 | 66.6 | 0 | 0 |
| | 1 | 6.29 | 100 | 1.44 | 0.05 | 49.0 | 0 | 0 |
| | 2 | 6.31 | 103 | 2.19 | 0.10 | 30.5 | 4 | 0 |
| 6.5 | 0 | 6.47 | 102 | 0.79 | 0.00 | 66.2 | 1 | 0 |
| | 1 | 6.49 | 101 | 1.53 | 0.05 | 48.4 | 1 | 0 |
| | 2 | 6.47 | 102 | 2.28 | 0.10 | 30.4 | 4 | 0 |

[0468] Selection of Formulation Buffer Concentration

[0469] A study was conducted to evaluate the effect of histidine buffer concentration on the solution stability of nivolumab. Solution samples were prepared with nivolumab concentrations of 100 mg/mL at pH 6.0. Histidine concentrations were adjusted to 10 mM, 20 mM and 30 mM. Each formulation also contained 250 mM sucrose, 0.05% w/w polysorbate 80 and 50 μM pentetic acid. Samples were filled into 3-cc glass vials which were stored at the accelerated storage condition of 25° C. for up to 6 months.

[0470] Throughout the study, the appearance of all samples was clear to slightly opalescent, colorless to pale-yellow. Additional stability results are presented in Table 3 and Table 4. Across the three histidine concentrations, there were no changes in solution pH or protein concentration. Levels of high and low molecular weight species increased with time at the same approximate rate during the 6 months of storage. Subvisible particulate levels were low, with no apparent trends.

TABLE 3
Effect of Histidine Concentration on the Stability of Nivolumab Stored for 6 Months at 25° C.

| Histidine | | | Protein | | | Subvisible Particulate Matter | |
|---|---|---|---|---|---|---|---|
| Concentration | Time | | Conc. | HMWS | LMWS | (Particles per Milliliter) | |
| (mM) | (Months) | pH | (mg/mL) | (Area %) | (Area %) | ≥10-μm | ≥25-μm |
| 10 mM | 0 | 6.14 | 101 | 0.98 | 0.07 | 8 | 0 |
| | 3 | 6.16 | 101 | 1.38 | 0.09 | 12 | 0 |
| | 6 | 6.09 | 100 | 1.42 | 0.08 | 40 | 0 |
| 20 mM | 0 | 6.10 | 102 | 0.94 | 0.07 | 10 | 0 |
| | 3 | 6.11 | 101 | 1.16 | 0.08 | 7 | 0 |
| | 6 | 6.13 | 102 | 1.31 | 0.10 | 25 | 0 |
| 30 mM | 0 | 6.12 | 100 | 0.91 | 0.07 | 7 | 0 |
| | 3 | 6.11 | 99 | 1.04 | 0.09 | 7 | 0 |
| | 6 | 6.14 | 101 | 1.30 | 0.08 | 32 | 2 |

[0471] Table 4 presents data for size variants by CE-SDS, both reduced and non-reduced. Over the 6 months of storage at the accelerated 25° C. condition, percent purity by both reduced and non-reduced CE-SDS was unchanged. Data for charge variants by iCIEF are also presented in Table 4. The level of acidic species for all 3 formulations increased by about 8% over the 6 months of storage at 25° C. The increase in acidic species was accompanied by an approximately equal decrease in main peak area. The level of basic species was little changed over the 6 month storage period. Based on the results of this study, a histidine buffer concentration of 20 mM was selected for the formulation of nivolumab SC injection.

TABLE 4
Effect of Histidine Concentration on the Stability of Nivolumab Stored for 6 Months at 25° C.

| Histidine | | Purity by CE-SDS | | iCIEF Results | | |
|---|---|---|---|---|---|---|
| Concentration | Time | Reduced | Non-Reduced | Acidic Group | Main Peak | Basic Group |
| (mM) | (Months) | (Area %) | (Area %) | (Area %) | (Area %) | (Area %) |
| 10 mM | 0 | 100.0 | 99.6 | 30.2 | 65.1 | 4.6 |
| | 3 | 100.0 | 99.8 | 34.9 | 60.3 | 4.8 |
| | 6 | 100.0 | 99.7 | 38.6 | 55.9 | 5.6 |
| 20 mM | 0 | 100.0 | 99.6 | 30.5 | 64.8 | 4.7 |
| | 3 | 100.0 | 99.6 | 34.4 | 60.5 | 5.1 |
| | 6 | 100.0 | 99.7 | 37.9 | 57.5 | 4.6 |
| 30 mM | 0 | 100.0 | 99.6 | 30.4 | 64.8 | 4.8 |
| | 3 | 100.0 | 99.7 | 35.2 | 60.2 | 4.6 |
| | 6 | 100.0 | 99.8 | 38.1 | 57.5 | 4.5 |

[0472] Selection of Tonicity Adjusting Agent

[0473] A study was performed to evaluate the effect of sucrose on the stability of nivolumiab in a high concentration protein formulation. Solutions were prepared with nivolumab concentrations of 100 mg/mL in 20 mM histidine buffer, pH 6.0, with sucrose concentrations ranging from 200 mM to 400 mM. Samples were monitored for up to 7 months at the accelerated condition of 25° C. The appearance of all samples remained clear to slightly opalescent, colorless to pale-yellow. Study results, presented in Table 5, show no changes in formulation pH or nivolumab concentration. The level of subvisible particulates for all samples was low, with no apparent trends. The rate of high and low molecular weight species formation was consistent across the range of sucrose concentrations evaluated in the study.

TABLE 5
Effect of Sucrose Concentration on the Stability Nivolumab
SC Injection Stored for 7 Months at 25° C.

| Sucrose | | | Protein | | | Subvisible Particulate Matter | |
|---|---|---|---|---|---|---|---|
| Concentration | Time | | Conc. | HMWS | LMWS | (Particles per Milliliter) | |
| (mM) | (Months) | pH | (mg/mL) | Area % | Area % | ≥10-μm | ≥25-μm |
| 200 | 0 | 5.98 | 102 | 0.65 | 0.00 | 2 | 2 |
| | 3 | 6.00 | 101 | 0.92 | 0.00 | 10 | 1 |
| | 7 | 6.02 | 101 | 1.02 | 0.03 | 3 | 0 |
| 250 | 0 | 5.97 | 101 | 0.65 | 0.00 | 2 | 0 |
| | 3 | 6.01 | 99 | 0.92 | 0.01 | 0 | 0 |
| | 7 | 6.02 | 99 | 1.03 | 0.03 | 5 | 0 |
| 330 | 0 | 5.98 | 100 | 0.65 | 0.00 | 5 | 0 |
| | 3 | 6.04 | 101 | 0.90 | 0.00 | 1 | 0 |
| | 7 | 5.98 | 99 | 1.02 | 0.03 | 2 | 1 |
| 400 | 0 | 5.97 | 102 | 0.65 | 0.00 | 5 | 0 |
| | 3 | 5.99 | 101 | 0.90 | 0.00 | 0 | 0 |
| | 7 | 6.01 | 99 | 1.01 | 0.01 | 3 | 0 |

[0474] Based on the results of the stability study, a sucrose concentration of 250 mM (85.6 g/L) was selected as the tonicity adjusting agent for the nivolumab SC injection formulation. As presented in FIG. 1, both formulation viscosity and osmolality increase with increasing sucrose concentration. But based on the results in Table 5, the increase in sucrose concentration was found to have little impact on the quality attributes of the formulation.

[0475] Selection of Surfactant Concentration

[0476] Polysorbate 80, a non-ionic surfactant, was evaluated for use in the formulation. Four different concentrations of polysorbate 80, 0.01% w/v, 0.03% w/v, 0.05% w/v and 0.07% w/v, along with a polysorbate 80-free sample, were evaluated for their effect on the stability of nivolumab SC injection. In the initial screening part of the study, formulations were prepared and then subjected to six freeze-thaw cycles (−60° C. to 25° C.). Formulations were also vigorously agitated on a wrist-action shaker for 60 minutes in room temperature/room light. Numerous visible particles were observed in the polysorbate 80-free samples when exposed to either freeze-thaw or agitation. Although reduced in number, visible particles were also observed in the 0.01% w/v/polysorbate 80 samples exposed to freeze-thaw or agitation. No visible particles were observed in the samples containing polysorbate 80 concentrations of 0.03% w/v, 0.05% w/v or 0.07% w/v. Thus, it was concluded that for nivolumab SC injection, a polysorbate 80 concentration below 0.01% w/v was insufficient to prevent the formulation of visible particles due to the stresses of freeze-thaw or vigorous agitation.

[0477] In the second part of this study, the effect of polysorbate 80 concentration on the stability of nivolumab SC injection was examined. Samples with polysorbate 80 concentrations of 0.03% w/v, 0.05% w/v and 0.07% w/v were stored at the stress condition of 40° C. and stability was monitored for two months. There were no changes in solution appearance throughout the study period and as presented in Table 6, there were no changes in pH or protein concentration. The rate of formation of high and low molecular weight species was relatively comparable across the three polysorbate 80 concentrations. Subvisible particulate levels for all samples were low, with no apparent trends. Based on the results of this study, a target polysorbate 80 concentration of 0.05% w/v was selected for the formulation of nivolumab SC injection.

TABLE 6
Effect of Polysorbate 80 Concentration on the Stability
Nivolumab SC Injection Stored for 2 Months at 40° C.

| Polysorbate 80 | | | Protein | | | Subvisible Particulate Matter | |
|---|---|---|---|---|---|---|---|
| Concentration | Time | | Conc. | HMWS | LMWS | (Particles per Milliliter) | |
| (% w/v) | (Months) | pH | (mg/mL) | Area % | Area % | ≥10-μm | ≥25-μm |
| 0.03 | 0 | 5.97 | 118 | 0.61 | 0.05 | 0 | 0 |
| | 1 | 5.99 | 119 | 2.09 | 0.12 | 5 | 0 |
| | 2 | 5.98 | 121 | 4.26 | 0.22 | 6 | 0 |
| 0.05 | 0 | 5.98 | 119 | 0.61 | 0.06 | 0 | 0 |
| | 1 | 6.01 | 120 | 2.14 | 0.13 | 6 | 0 |
| | 2 | 5.99 | 120 | 4.41 | 0.24 | 8 | 0 |
| 0.07 | 0 | 5.97 | 120 | 0.61 | 0.05 | 1 | 0 |
| | 1 | 5.99 | 120 | 2.27 | 0.13 | 6 | 0 |
| | 2 | 6.01 | 119 | 4.70 | 0.22 | 6 | 0 |

[0478] Addition of a Metal Ion Chelator

[0479] EDTA and DTPA (pentetic acid) were evaluated as potential metal chelators to be incorporated into the formulation for nivolumab SC injection. A preliminary screening study was performed to compare the performance of EDTA versus pentetic acid when nivolumab containing samples were spiked with metal. In this study, a solution was prepared containing nivolumab at 10 mg/mL in 20 mM histidine with 260 mM sucrose at pH 6.0. The samples were spiked with metal to a concentration of 500 ppb iron, 15 ppb chromium, 15 ppb nickel, 30 ppb copper, 10 ppb molybdenum and 10 ppb manganese. Unspiked samples were also prepared to serve as controls. The following six formulations were prepared: 1. Formulation A: no metal spike, no EDTA or pentetic acid; 2. Formulation B: no metal spike, 50 μM pentetic acid; 3. Formulation C: no metal spike, 50 μM EDTA; and 4. Formulation D: metal spike, no EDTA or pentetic acid; 5. Formulation E: metal spike, 50 μM pentetic acid; and 6. Formulation F: metal spike, 50 μM EDTA.

[0480] Samples were placed at the stress condition of 40° C. and levels of HMWS and LMWS were monitored for up to 4 weeks. The data presented in Table 7 show the benefit of added metal ion chelator. For formulation D, where the sample was spiked with metal, but no added chelator, the level of HMWS increased from 0.27% to 7.07% and the level of LMWS increased from 0.12% to 0.32% over the 4 weeks of storage at 40° C. EDTA, at a concentration of 50 μM (Formulation F) was able to limit the increase in levels of HMWS and LMWS to 3.75% and 0.18%, respectively, for the metal spiked samples. The best performance for metal spiked samples however was observed with the 50 μM pentetic acid where the level of HMWS increased to only 0.55% and there was no change in the level of LMWS over the 4 week study period. Even the unspiked formulations A, B and C, showed the benefit of added metal ion chelator. With no added chelator, the level of HMWS increased from 0.27% to 1.94% and the level of LMWS increased from 0.12% to 0.17% over the 4 weeks of storage at 40° C. When 50 μM pentetic acid or 50 p EDTA was included in the formulation, the increases in HMWS were reduced, from 0.26% to 0.48% for pentetic acid and from 0.26% to 0.52% for EDTA. The levels of LMWS for the samples containing metal ion chelator were unchanged over the 4 week storage period. Based on the results of this study, pentetic acid was selected as the metal ion chelator for the nivolumab SC injection formulation.

TABLE 7
Effect of EDTA vs Pentetic Acid on the Stability of Nivolumab
Stored for 4 Weeks at 40° C. After Spiking with Metal Ions

| | Time | HMWS | LMWS |
|---|---|---|---|
| Formulation | (Weeks) | Area % | Area % |
| Formulation A: No metal spike, | 0 | 0.27 | 0.12 |
| no EDTA or pentetic acid | 2 | 0.50 | 0.14 |
| | 4 | 1.94 | 0.17 |
| Formulation B: No metal spike, | 0 | 0.26 | 0.12 |
| 50 μM pentetic acid | 2 | 0.32 | 0.13 |
| | 4 | 0.48 | 0.12 |
| Formulation C: No metal spike, | 0 | 0.26 | 0.12 |
| 50 μM EDTA | 2 | 0.34 | 0.13 |
| | 4 | 0.52 | 0.12 |
| Formulation D: Metal spike, | 0 | 0.27 | 0.12 |
| no EDTA or pentetic acid | 2 | 4.66 | 0.33 |
| | 4 | 7.07 | 0.32 |
| Formulation E: Metal spike, | 0 | 0.26 | 0.12 |
| 50 μM pentetic acid | 2 | 0.34 | 0.13 |
| | 4 | 0.55 | 0.12 |
| Formulation F: Metal spike, | 0 | 0.26 | 0.12 |
| 50 μM EDTA | 2 | 1.23 | 0.22 |
| | 4 | 3.75 | 0.18 |

[0481] To further investigate the benefits of a metal ion chelator in preventing degradation that could potentially occur from the presence of trace metal ions, a second, more in-depth study was performed to evaluate the effect of pentetic acid on the stability of nivolumab SC injection. The formulation tested in this study was 120 mg/mL nivolumab in 20 mM histidine buffer, pH 6.0, with 250 mM sucrose and 0.05% w/v polysorbate 80. Solutions were spiked with a concentrated metal solution so that the total metal concentration in the metal spiked samples was 1.5 ppm (0.5 ppm each of iron, chromium and copper). As in the previous study, unspiked samples were also prepared to serve as controls. The following five formulations were prepared: 1. Formulation A: no metal spike, no pentetic acid; 2. Formulation B: no metal spike, 50 μM pentetic acid; 3. Formulation C: 1.5 ppm metal spike, no pentetic acid; 4. Formulation D: 1.5 ppm metal spike, 50 μM pentetic acid; and 5. Formulation E: 1.5 ppm metal spike, 100 μM pentetic acid.

[0482] Samples were filled into 3-cc glass vials that were stoppered and stored at the stress condition of 40° C. and stability was monitored for two months. There were no changes in solution appearance throughout the study period and as presented in Table 8, there were no changes in pH or protein concentration. Subvisible particulate levels for all samples were low, with no apparent trends. After 2 months of storage at 40° C., the level of HMWS and LMWS was the highest in Formulation C, the metal spiked solution without added pentetic acid. Lower and equal levels of HMWS and LMWS were observed in Formulations D and E, containing 50 μM and 100 μM pentetic acid, respectively. Results from the unspiked formulations A and B also showed the benefit of added pentetic acid. With no added chelator (formulation A), the level of HMWS increased from 0.61% to 4.34% and the level of LMWS increased from 0.05% to 0.25% over the 2 months of storage at 40° C. When 50 μM pentetic acid was included in the formulation (formulation B), the level of HMWS at the 2 month timepoint was only 2.97% and the level of LMWS at the 2 month timepoint was only 0.20%. Based on the results of this study, a target pentetic acid concentration of 50 μM was selected for the formulation of nivolumab SC injection.

TABLE 8
Effect of Trace Metal Spiking and Pentetic Acid on the Stability
Nivolumab SC Injection Stored for 2 Months at 40° C.

| | | | Protein | | | Subvisible Particulate Matter | |
|---|---|---|---|---|---|---|---|
| | Time | | Conc. | HMWS | LMWS | (Particles per Milliliter) | |
| Formulation | (Months) | pH | (mg/mL) | Area % | Area % | ≥10-μm | ≥25-μm |
| Formulation A: | 0 | 5.92 | 118 | 0.61 | 0.05 | 1 | 0 |
| No metal spike, | 1 | 5.92 | 117 | 2.11 | 0.12 | 5 | 0 |
| No pentetic acid | 2 | 5.91 | 118 | 4.34 | 0.25 | 11 | 0 |
| Formulation B: | 0 | 5.93 | 117 | 0.60 | 0.05 | 1 | 0 |
| No metal spike, | 1 | 5.92 | 117 | 1.67 | 0.10 | 9 | 0 |
| 50 μM pentetic acid | 2 | 5.90 | 117 | 2.97 | 0.20 | 2 | 0 |
| Formulation C: | 0 | 5.93 | 116 | 0.61 | 0.06 | 1 | 1 |
| 1.5 ppm metal spike, | 1 | 5.91 | 118 | 3.13 | 0.17 | 4 | 0 |
| No pentetic acid | 2 | 5.92 | 119 | 5.90 | 0.30 | 9 | 0 |
| Formulation D: | 0 | 5.93 | 116 | 0.61 | 0.06 | 0 | 1 |
| 1.5 ppm metal spike, | 1 | 5.90 | 119 | 1.86 | 0.11 | 9 | 0 |
| 50 μM pentetic acid | 2 | 5.91 | 118 | 3.39 | 0.20 | 7 | 0 |
| Formulation E: | 0 | 5.92 | 118 | 0.62 | 0.06 | 0 | 0 |
| 1.5 ppm metal spike, | 1 | 5.91 | 117 | 1.85 | 0.11 | 5 | 0 |
| 100 μM pentetic acid | 2 | 5.90 | 118 | 3.39 | 0.20 | 9 | 0 |

[0483] Selection of Protein Concentration

[0484] A number of experiments were conducted to aid in the selection of a target protein concentration for nivolumab SC injection. The formulation was found to be stable during handling, and ultrafiltration runs allowed for nivolumab concentrations as high as 200 mg/mL to be attained. However, it was found that viscosity increases rapidly at nivolumab concentrations greater than 150 mg/mL.

[0485] L-arginine is an amino acid that is known to lower solution viscosity. In order to evaluate the effect of arginine on formulation viscosity, a study was conducted where 75 mM arginine was added to a 140 mg/mL nivolumab SC formulation (in 20 mM histidine, 250 mM sucrose, 0.05% w/v polysorbate 80, 50 μM pentetic acid, pH 6.0) and then concentrated using a 10 kDa membrane and a centrifuge. The effect of added arginine on formulation viscosity is shown in FIG. 2. At nivolumab concentrations greater than 100 mg/mL, 75 mM arginine causes a lowering of solution viscosity. For example, the viscosity of a 140 mg/mL nivolumab formulation at 20° C. without arginine was 13.3 cP, but with 75 mM arginine it was 9.1 cP. Viscosity measurements were made at 20° C.

[0486] A study was then conducted to evaluate the effect of 75 mM arginine on the stability of nivolumab SC injection (ELN A0C6F-023, ELN A259D-007). Small batches of nivolumab were prepared in 20 mM histidine pH 6.0, with 250 mM sucrose, 0.05% w/v polysorbate and 50 μM pentetic acid. Nivolumab concentrations were either 100 mg/mL or 140 mg/mL and solutions were prepared both with and without, 75 mM arginine. Typical stability data were generated for monitored quality attributes except that at the 3 month 40° C. timepoint, numerous small white visible particles were observed in the arginine containing formulations. No visible particles were observed in the formulations without arginine. Based on these stability results, it was decided that arginine would not be included in the formulation for nivolumab SC injection.

[0487] The target nivolumab concentration selected for nivolumab SC injection was 120 mg/mL. The formulation chosen for the FIH clinical trials was 20 mM histidine buffer at pH 6.0, with 250 mM sucrose, 0.05% w/v polysorbate 80 and 50 μM pentetic acid. Drug substance is provided in the same formulation, but at a target concentration of 150 mg/mL with storage at −60° C.

[0488] Stability Data for Laboratory Scale Batches of Nivolumab SC Injection

[0489] Two lab scale batches of nivolumab SC injection were prepared and placed on stability. Both batches used the selected FIH formulation, 20 mM histidine buffer at pH 6.0, 250 mM sucrose, 0.05% w/v polysorbate 80 and 50 μM pentetic acid. In order to bracket the 120 mg/mL protein concentration that was selected for the FIH formulation, the nivolumab concentration for one batch was 100 mg/mL and for the other batch it was 140 mg/mL. The formulations were prepared and small aliquots were aseptically filtered into 3-cc Type I glass vials. The vials were stoppered, sealed and placed on station at 5° C., 25° C. and 40° C. At specified timepoints, samples were pulled from the stability station and tested for appearance, pH, protein concentration, size homogeneity by SE-HPLC, subvisible particulate matter by HIAC, charge variants by iCIEF and molecular size variants by CE-SDS (R&NR).

[0490] The visual appearance for all samples at all timepoints was a clear to slightly opalescent, colorless to pale-yellow solution. Additional stability data are provided in Tables 9 to 11. As shown in Table 9, for both the 100 mg/mL and the 140 mg/mL samples, there were no changes observed in pH or protein concentration throughout the study. Over 12 months of storage at 5° C., the level of HMWS increased by 0.56% for the 100 mg/mL samples and by 0.73% for the 140 mg/mL samples. For the accelerated 25° C. condition, after 6 months of storage the level of HMWS increased by 0.88% for the 100 mg/mL samples and by 1.15% for the 140 mg/mL samples. At the 40° C. stress condition, the level of HMWS increased over 3 months of storage by 3.17% and 3.92% for the 100 mg/mL and the 140 mg/mL samples, respectively. The level of LMWS was little changed for samples stored at 5° C. and 25° C., but increased by about 0.2% for samples stored for 3 months at 40° C.

TABLE 9
Stability Data for Nivolumab SC Injection, 100 mg/mL and 140 mg/mL

| | | | | Protein | | SE-HPLC | | SE-HPLC | | SE-HPLC | |
|---|---|---|---|---|---|---|---|---|---|---|---|
| | | | | Concentration | | HMWS | | Monomer | | LMWS | |
| | | pH | | (mg/mL) | | (Area %) | | (Area %) | | (Area %) | |
| Storage | Time | 100 | 140 | 100 | 140 | 100 | 140 | 100 | 140 | 100 | 140 |
| Cond. | (Months) | mg/mL | mg/mL | mg/mL | mg/mL | mg/mL | mg/mL | mg/mL | mg/mL | mg/mL | mg/mL |
| Initial | 0 | 6.14 | 6.20 | 100 | 141 | 0.69 | 0.75 | 99.19 | 99.14 | 0.12 | 0.11 |
| 5° C. | 3 | 6.20 | 6.21 | 102 | 139 | 0.89 | 1.04 | 99.00 | 98.85 | 0.12 | 0.11 |
| | 6 | 6.17 | 6.17 | 99 | 133 | 0.97 | 1.16 | 98.91 | 98.72 | 0.12 | 0.12 |
| | 9 | 6.14 | 6.16 | 101 | 137 | 1.19 | 1.41 | 98.69 | 98.47 | 0.12 | 0.12 |
| | 12 | 6.16 | 6.18 | 98 | 137 | 1.25 | 1.48 | 98.61 | 98.38 | 0.14 | 0.14 |
| 25° C. | 3 | 6.19 | 6.21 | 104 | 142 | 1.30 | 1.57 | 98.57 | 98.31 | 0.13 | 0.12 |
| | 6 | 6.18 | 6.19 | 101 | 135 | 1.57 | 1.90 | 98.29 | 97.97 | 0.14 | 0.13 |
| 40° C. | 1 | 6.18 | 6.22 | 98 | 141 | 1.29 | 1.60 | 98.59 | 98.29 | 0.12 | 0.11 |
| | 3 | 6.20 | 6.21 | 101 | 141 | 3.86 | 4.67 | 95.86 | 95.04 | 0.28 | 0.29 |

[0491] Table 10 presents results for subvisible particulates and charge variants. The level of subvisible particulates for all samples at all timepoints was low and there were no apparent trends. The level of acidic species increased with time at all storage conditions. Over 12 months of storage at 5° C., acidic species increased by 6.3% for the 100 mg/mL samples and by 5.8% for the 140 mg/(L samples. At the accelerated 25° C. condition, acidic species increased by 26.0% for the 100 mg/mL samples and by 23.8% for the 140 mg/mL samples. At the 40° C. stress condition, the level of acidic species increased over 3 months of storage by 44.9% and 43.9% for the 100 mg/mL and the 140 mg/mL samples, respectively. The increase in acidic species was accompanied by an approximately equal decrease in main peak area. For all samples, the level of basic species was little changed throughout the study period.

TABLE 10
Stability Data for Nivolumab SC Injection, 100 mg/mL and 140 mg/mL

| | | Subvisible | | Subvisible | | iCIEF | | iCIEF | | iCIEF | |
|---|---|---|---|---|---|---|---|---|---|---|---|
| | | Particulates ≥10-μm | | Particulates ≥25-μm | | Acidic Group | | Main Peak | | Basic Group | |
| | | (particles/mL) | | (particles/mL) | | (Area %) | | (Area %) | | (Area %) | |
| Storage | Time | 100 | 140 | 100 | 140 | 100 | 140 | 100 | 140 | 100 | 140 |
| Cond. | (Months) | mg/mL | mg/mL | mg/mL | mg/mL | mg/mL | mg/mL | mg/mL | mg/mL | mg/mL | mg/mL |
| Initial | 0 | 2 | 3 | 0 | 0 | 27.7 | 29.1 | 67.8 | 65.9 | 4.4 | 5.0 |
| 5° C. | 3 | 4 | 7 | 0 | 3 | 29.7 | 31.0 | 66.4 | 64.7 | 3.9 | 4.4 |
| | 6 | 2 | 2 | 1 | 0 | 30.3 | 31.0 | 64.2 | 65.5 | 5.6 | 3.5 |
| | 9 | 13 | 5 | 1 | 5 | 31.2 | 31.3 | 63.7 | 63.8 | 5.1 | 4.8 |
| | 12 | 5 | 5 | 0 | 2 | 34.0 | 34.9 | 61.4 | 60.4 | 4.5 | 4.7 |
| 25° C. | 3 | 7 | 4 | 2 | 1 | 41.4 | 41.6 | 52.9 | 52.4 | 5.8 | 5.9 |
| | 6 | 8 | 0 | 0 | 0 | 53.7 | 52.9 | 39.9 | 40.6 | 6.5 | 6.4 |
| 40° C. | 1 | 5 | 1 | 0 | 0 | 48.3 | 48.1 | 46.1 | 45.3 | 5.6 | 6.6 |
| | 3 | 15 | 4 | 0 | 0 | 72.6 | 73.0 | 22.1 | 21.5 | 5.3 | 5.5 |

[0492] Table 11 presents data for size variants by CE-SDS, both reduced and non-reduced. Over 12 months of storage at 5° C., percent purity by both reduced and non-reduced CE-SDS was unchanged for the 100 mg/mL and the 140 mg/mL samples. At the accelerated 25° C. condition, over 6 months of storage, percent purity by reduced CE-SDS was unchanged for the 100 mg/mL samples and decreased by 0.2% for the 140 mg/mL samples. At the 40° C. stress condition, the percent purity by reduced CE-SDS decreased over 3 months of storage by 1.0% for the 100 mg/mL samples and by 1.4% for the 140 mg/mL samples. For non-reduced CE-SDS, percent purity decreased by 2.2% over 6 months of storage at 25° C. for the 100 mg/mL samples. For the 140 mg/mL samples, the decrease in percent purity was 1.8%. At the 40° C. stress condition, the decrease in percent purity by non-reduced CE-SDS over 3 months of storage was 2.6% and 3.1% for the 100 mg/mL and the 140 mg/mL samples, respectively.

TABLE 11
Stability Data for Nivolumab SC Injection,
100 mg/mL and 140 mg/mL

| | | Purity by CE-SDS | | Purity by CE-SDS | |
|---|---|---|---|---|---|
| | | (Reduced) (Area %) | | (Non-Reduced) (Area %) | |
| Storage | Time | 100 | 140 | 100 | 140 |
| Cond. | (Months) | mg/mL | mg/mL | mg/mL | mg/mL |
| Initial | 0 | 99.5 | 99.8 | 99.3 | 99.2 |
| 5° C. | 3 | 100.0 | 100.0 | 99.5 | 99.5 |
| | 6 | 100.0 | 100.0 | 99.3 | 98.9 |
| | 9 | 100.0 | 100.0 | 99.3 | 99.2 |
| | 12 | 100.0 | 100.0 | 99.3 | 99.2 |
| 25° C. | 3 | 99.8 | 99.8 | 98.8 | 98.9 |
| | 6 | 99.6 | 99.6 | 97.1 | 97.4 |
| 40° C. | 1 | 99.9 | 99.9 | 98.4 | 98.2 |
| | 3 | 98.5 | 98.4 | 96.7 | 96.1 |

[0493] Description and Composition of Drug Product Selected for FIH Clinical Trials

[0494] The drug product selected for FIH clinical trials was Nivolumab Injection, 960 mg/Vial (120 mg/mL). It is described as a sterile, non-pyrogenic, clear to very opalescent, colorless to yellow liquid. A few particulates, consistent in appearance to proteinaceous particles, may be present in some instances. The drug product is a single-use, preservative-free, isotonic aqueous solution for subcutaneous (SC) administration. Nivolumab SC injection is packaged in 10-cc Type 1 flint glass vials, stoppered with 20-mm Daikyo D21-7S Flurotec® coated butyl stoppers that are secured with 20-mm aluminum seals with flip-off caps. The composition of nivolumab SC injection, which includes the quality standard and function of each component, is presented in Table 12. An overfill of nivolumab SC injection is included in each vial to ensure that the labeled quantity of 8.0 mL can be administered to the patient. In determining the overfill for the drug product, the following were taken into account: 1. 0.5 mL for losses in the vial, needle and syringe (VNS) during use of the product (consistent with USP <1151> minimum recommended excess volume fill); 2. 0.2 mL for losses in a closed system transfer device (if used); 3. 0.5 mL for priming losses in winged infusion set (if used); and 4. 0.3 mL for filling machine variability.

[0495] Based on the amounts of nivolumab SC injection that can potentially be lost during dose preparation and administration, an overfill of 1.5 mL is included in each vial of drug product.

TABLE 12
Composition of Nivolumab Injection, 960 mg/vial
(120 mg/mL) for FIH Clinical Studies

| | | | Amount per |
|---|---|---|---|
| Component | Quality Standard | Function | Vial (mg)^{a} |
| Nivolumab | BMS Specification | Active ingredient | 1,140 |
| L-Histidine | USP, Ph. Eur., JP | Buffering agent | 14.7 |
| L-Histidine | Ph. Eur., JP | Buffering agent | 20.0 |
| HCl H₂O | | | |
| Sucrose | NF, Ph. Eur., JP | Tonicity modifier | 813 |
| Polysorbate 80 | NF, Ph. Eur., JP | Surfactant | 4.75 |
| Pentetic Acid | USP | Metal ion chelator | 0.187 |
| Water for | USP, Ph. Eur., JP | Solvent | q.s. to 9.50 mL |
| Injection | | | |

^{a}Target fill includes a 1.5 mL overfill to account for vial, needle, and syringe (VNS) holdup, filling machine variability and administration component holdup
USP = United States Pharmacopoeia,
Ph. Eur. = European Pharmacopoeia,
NF = National Formulary,
JP = Japanese Pharmacopoeia,
q.s. = quantity sufficient

[0496] IND Enabling Stability Batch for FIH Formulation

[0497] A development laboratory batch of nivolumab SC injection (FIH formulation) was manufactured and placed on stability. The batch size was 3,000 mL in size and it yielded 291 vials after inspection. The drug product was filled (target fill of 9.5 mL) into Schott 10-cc Type I flint glass vials which were closed with 20-mm Daikyo D-21-7-S Flurotec coated butyl rubber stoppers. The vials were sealed with 20-mm West aluminum seals with flip-off caps. The drug product vials were placed on station at 5° C., 25° C. and 40° C. At specified timepoints, samples were pulled from the stability station and tested. Twelve months of stability data are presented in Table 13 to Table 16.

[0498] The visual appearance for all samples at all timepoints was a clear to slightly opalescent, colorless to pale-yellow solution. Additional stability data are provided in Tables 13 to 16. As shown in Table 13, there were no changes observed in pH or protein concentration throughout the study. Over 12 months of storage at 5° C., the level of HMWS increased by 0.3%. At the accelerated 25° C. condition, after 6 months of storage the level of HMWS increased by 0.6%. At the 40° C. stress condition, the level of HMWS increased over 3 months of storage by 3.3%. The level of LMWS was little changed for samples stored at 5° C. and 25° C., but increased by 1.1% for samples stored for 3 months at 40° C.

TABLE 13
Stability Data for Nivolumab SC Injection, 960 mg/vial (120 mg/mL)

| | | | | Nivolumab | SE-HPLC | | |
|---|---|---|---|---|---|---|---|
| Storage | Time | | Solution | Concentration | HMWS | Monomer | LMWS |
| Cond. | (Months) | Appearance | pH | (mg/mL) | (Area %) | (Area %) | (Area %) |
| Initial | 0 | Complies^{a} | 5.9 | 121.9 | 0.7 | 99.2 | 0.1 |
| 5° C. | 1 | Complies | 6.0 | 125.6 | 0.7 | 99.3 | <0.1 |
| | 3 | Complies | 5.9 | 126.5 | 0.8 | 99.1 | 0.1 |
| | 6 | Complies | 5.9 | 121.8 | 0.8 | 99.1 | <0.1 |
| | 9 | Complies | 5.8 | 122.6 | 1.0 | 98.9 | 0.1 |
| | 12 | Complies | 5.8 | 125.6 | 1.0 | 99.0 | <0.1 |
| 25° C./ | 1 | Complies | 5.9 | 125.6 | 0.9 | 99.0 | <0.1 |
| 60% RH | 3 | Complies | 6.0 | 126.3 | 1.1 | 98.8 | 0.1 |
| | 6 | Complies | 5.9 | 124.3 | 1.3 | 98.6 | <0.1 |
| 40° C./ | 0.5 | Complies | 5.9 | 123.8 | 1.2 | 98.7 | 0.1 |
| 75% RH | 1 | Complies | 6.0 | 126.8 | 1.6 | 98.3 | 0.1 |
| | 3 | Complies | 5.9 | 125.9 | 4.0 | 94.8 | 1.2 |

^{a}Complies = Clear to very opalescent, colorless to yellow liquid, light (few) particulates (consistent in appearance to protein particulates) may be present.

[0499] Table 14 presents data for size variants by CE-SDS, both reduced and non-reduced. Over 12 months of storage at 5° C., percent purity by both reduced and non-reduced CE-SDS was unchanged. At the accelerated 25° C. condition, over 6 months of storage, percent purity by reduced CE-SDS decreased by 0.2%. At the 40° C. stress condition, the percent purity by reduced CE-SDS decreased over 3 months of storage by 2.9%. For non-reduced CE-SDS, percent purity decreased by 1.2% over 6 months of storage at 25° C. and by 4.4% over 3 months of storage at the 40° C. stress condition.

TABLE 14
Stability Data for Nivolumab SC Injection,
960 mg/vial (120 mg/mL)

| | | CE-SDS (Reduced) | | CE-SDS (Non-Reduced) | |
|---|---|---|---|---|---|
| | | | Sum of | | Sum of |
| | | | Minor | | Minor |
| | | | Peaks ≥ | | Peaks ≥ |
| Storage | Time | Purity | LOQ | Purity | LOQ |
| Cond. | (Months) | (Area %) | (Area %) | (Area %) | (Area %) |
| Initial | 0 | 99.6 | <0.5 | 98.4 | 0.8 |
| 5° C. | 1 | 99.3 | 0.5 | 98.3 | 1.0 |
| | 3 | 99.7 | <0.5 | 99.3 | 0.7 |
| | 6 | 99.7 | <0.5 | 98.5 | 1.3 |
| | 9 | 99.7 | <0.5 | 98.5 | 0.9 |
| | 12 | 99.7 | <0.5 | 98.3 | 1.0 |
| 25° C./ | 1 | 99.3 | <0.5 | 98.1 | 1.0 |
| 60% RH | 3 | 99.5 | <0.5 | 98.9 | 0.8 |
| | 6 | 99.4 | <0.5 | 97.2 | 2.3 |
| 40° C./ | 0.5 | 99.0 | 0.5 | 98.2 | 0.9 |
| 75% RH | 1 | 98.8 | <0.5 | 96.8 | 2.4 |
| | 3 | 96.7 | 1.9 | 94.0 | 4.2 |

[0500] The level of acidic species increased with time at all storage conditions. Over 12 months of storage at 5° C., acidic species increased by 0.8%. At the accelerated 25° C. condition, acidic species increased by 11.3% over 6 months of storage. At the 40° C. stress condition, the level of acidic species increased over 3 months of storage by 38.8%. The level of basic species was little changed throughout the 12 months of storage at 5° C. At the 25° C. condition the level of basic species increased by 1.6% over 6 months and after 3 months of storage at 40° C., the level of basic species increased by 2.6%. The increases observed in acidic and basic species were accompanied by approximately equal decreases in main peak area.

TABLE 15
Stability Data for Nivolumab SC Injection,
960 mg/vial (120 mg/mL)

| | | iCIEF | | |
|---|---|---|---|---|
| Storage | Time | Acidic Group | Main Peak | Basic Group |
| Cond. | (Months) | (Area %) | (Area %) | (Area %) |
| Initial | 0 | 31.4 | 63.8 | 4.8 |
| 5° C. | 1 | 31.2 | 63.8 | 5.0 |
| | 3 | 32.5 | 62.8 | 4.8 |
| | 6 | 33.3 | 62.2 | 4.5 |
| | 9 | 32.9 | 62.1 | 4.9 |
| | 12 | 32.2 | 62.9 | 4.9 |
| 25° C./ | 1 | 34.1 | 60.7 | 5.2 |
| 60% RH | 3 | 37.6 | 56.7 | 5.8 |
| | 6 | 42.7 | 50.9 | 6.4 |
| 40° C./ | 0.5 | 40.4 | 52.5 | 7.0 |
| 75% RH | 1 | 47.1 | 45.1 | 7.8 |
| | 3 | 70.2 | 22.4 | 7.4 |

[0501] Table 16 presents results for activity binding ELISA, cell-based bioassay and subvisible particulates. Across all temperatures and timepoints, results for activity binding ELISA range from 95% to 112% and for cell-based bioassay range from 79% to 105%. The level of subvisible particulates for all samples at all timepoints was low and there were no apparent trends.

TABLE 16
Stability Data for Nivolumab SC Injection,
960 mg/vial (120 mg/mL)

| | | | | Particluate Matter | |
|---|---|---|---|---|---|
| | | Activity | | Particles/ | Particles/ |
| Storage | Time | Binding | Cell-Based | Vial ≥10 | Vial ≥25 |
| Cond. | (Months) | ELISA % | Bioassay % | microns | microns |
| Initial | 0 | 109 | 79 | 43 | 0 |
| 5° C. | 1 | 103 | 101 | 56 | 0 |
| | 3 | 108 | 95 | 32 | 0 |
| | 6 | 97 | 89 | 56 | 0 |
| | 9 | 105 | 78 | 112 | 5 |
| | 12 | 102 | 96 | 40 | 5 |
| 25° C./ | 1 | 110 | 105 | 77 | 3 |
| 60% RH | 3 | 100 | 84 | 45 | 0 |
| | 6 | 96 | 88 | 45 | 0 |
| 40° C./ | 0.5 | 110 | 79 | 19 | 0 |
| 75% RH | 1 | 112 | 97 | 53 | 0 |
| | 3 | 95 | 94 | 27 | 3 |

[0502] Clinical Batch Manufacture (FIH Formulation)

[0503] Two clinical batches, BATCH 1 and BATCH 2, of nivolumab SC injection using the FIH formulation were manufactured. Both batches had a final batch scale of approximately 20 liters, which was filled into about 1,800 vials. Both batches passed all final testing and were released for clinical use. Release test results for these first two clinical batches of nivolumab SC injection are presented in Table 17.

[0504] A brief description of the manufacturing process is provided as follows. Nivolumab drug substance, 150 mg/mL in 20 mM histidine, 250 mM sucrose, 0.05% (w/v) polysorbate 80, and 50 μM pentetic acid at pH 6.0 was thawed at room temperature, protected from light, with sufficient space between the containers to ensure thawing efficiency. Once the drug substance was fully thawed, the bags were manually mixed for 2 to 3 minutes to ensure homogeneity. The formulation buffer solution (20 mM histidine, 250 mM sucrose, 0.05% (w/v) polysorbate 80, and 50 μM pentetic acid at pH 6.0) was prepared and then filtered through a 0.22-μm filter. A specific quantity of buffer solution was added to the drug substance to adjust the protein concentration to 120 mg/mL. Samples were removed for protein concentration determination, pH, and endotoxin testing. The 120 mg/mL drug product solution was filtered through a 0.45-μm pre-filter. A sample was removed for bioburden testing. The drug product solution was filtered through two 0.22-μm filters. Pre-filtration and post-filtration integrity tests were performed on the filters. The sterile filtered solution was then filled into washed, sterilized, depyrogenated vials. The vials were stoppered with sterilized stoppers and sealed with aluminum seals. During the filling process, fill weight checks were performed at regular intervals. The sealed vials were 100% visually inspected for defects. The inspected vials were labeled and packaged.

TABLE 17
Release Test Results for the First Two Clinical
Batches of Nivolumab SC Injection, 120 mg/mL

| Test | BATCH 1 | | BATCH 2 | |
|---|---|---|---|---|
| Appearance | Complies | | Complies | |
| pH | 5.9 | | 5.8 | |
| Identity: Peptide Map and | Sample identified as Nivolumab | | Sample identified as Nivolumab | |
| Concentration | 119.5 | mg/mL | 120.6 | mg/mL |
| Protein Concentration (A₂₈₀) | 119.5 | mg/mL | 120.6 | mg/mL |
| Activity Binding ELISA | 105% | | 100% | |
| Cell-Based Bioassay | 105% | | 99% | |
| SE-HPLC | Monomer: 99.2 Area % | | Monomer: 99.3 Area % | |
| | HMW: 0.6 Area % | | HMW: 0.6 Area % | |
| | LMW: 0.1 Area % | | LMW: 0.1 Area % | |
| CE-SDS (Non-Reduced) | 99 Area % | | 99 Area % | |
| | Sum of minor peaks ≥ | | Sum of minor peaks ≥ | |
| | LOQ: 1 Area % | | LOQ: 1 Area % | |
| CE-SDS (Reduced) | 100 Area % | | 100 Area % | |
| | Sum of minor peaks ≥ | | Sum of minor peaks ≥ | |
| | LOQ: <0.5 Area % | | LOQ: <1 Area % | |
| iCIEF | Main Peak: 62.2 Area % | | Main Peak: 63.2 Area % | |
| | Acidic Group: 33.1 Area % | | Acidic Group: 32.0 Area % | |
| | Basic Group: 4.6 Area % | | Basic Group: 4.8 Area % | |
| Endotoxin (LAL) | <0.01 | EU/mg protein | <0.01 | EU/mg protein |
| Particulate Matter | ≥10 μm: 32 particles/vial | | ≥10 μm: 64 particles/vial | |
| | ≥25 μm: 0 particles/vial | | ≥25 μm: 5 particles/vial | |
| Osmolality | 336 | mOsm/kg | 323 | mOsm/kg |
| Sterility | Complies | | Complies | |
| Extractable Volume in | 9.4 | mL | 9.3 | mL |
| Container | | | | |
| Polysorbate 80 | 460 | μg/mL | 0.05% | w/v |

[0505] Formal Use-Time/Compatibility Study

[0506] A use-time study was performed to support the subcutaneous clinical administration of Nivolumab Injection, 960 mg/Vial (120 mg/mL). In the initial clinical studies, nivolumab was administered subcutaneously (SC) to patients using one of two methods. For Method 1, nivolumab was administered as a bolus subcutaneous injection at a rate between 2 and 4 milliliters per minute at doses of 480 mg, 720 mg and 960 mg, after addition of small aliquots of normal saline (NS) and rHuPH20 (ENHANZE Drug Product (EDP)) to adjust the nivolumab concentration in the vial to 109.1 mg/mL and the rHuPH20 concentration to 2,000 U/mL. At a concentration of 109.1 mg/mL, SC administered volumes of 4.4 mL, 6.6 mL and 8.8 mL provided nivolumab doses of 480 mg, 720 mg and 960 mg, respectively. For Method 2, the dose of 960 mg (8 mL of 120 mg/mL) was administered (without addition of NS and EDP) using a syringe pump over approximately 30 minutes (˜0.27 mL/minute). To simulate worst case conditions in this use-time study, solution flow rates of as high as 4 milliliters per minute were qualified while passing through 27G ½″ needles. Also, once the drug product was in the administration syringe, a hold period of up to 24 hours was qualified at 2°-8° C., with 4 hours of the 24 hours at room temperature/room light (RT/RL).

[0507] For Method 1, 0.76 mL NS and 0.19 mL EDP were added to vials of nivolumab SC injection which were then gently swirled and inverted to mix. The vial contents were pulled into separate 10-cc syringes. At the initial timepoint, the vial contents were expelled through winged infusion sets (27G ½″ needle) into sampling containers at a rate of 4 mL/minute. Tip caps were applied to the other group of filled syringes which were held at RT/RL for 4 hours, then at 2°-8° C., protected from light, for an additional 20 hours. At the 24 hour timepoint, the vial contents were again expelled through winged infusion sets into sampling containers at a rate of 4 mL/minute. For Method 2, vial contents (without added NS or EDP) were pulled into separate 10-cc syringes. Samples were collected, stored and sampled as described above for Method 1.

[0508] The results from the use-time study are presented in Tables 18-21. Table 18 shows results for protein concentration and size homogeneity by SE-HPLC. Throughout the study period, there were no changes in protein concentration or in the level of high or low molecular weight species.

TABLE 18
Test Results for Protein Concentration and Size Homogeneity

| | | Protein | | | |
|---|---|---|---|---|---|
| | | Conc. | Monomer | HMWS | LMWS |
| Preparation | Time | (mg/mL) | Area % | Area % | Area % |
| Method 1: 0.76 mL NS and 0.19 mL EDP | Initial | 109 | 0.7 | 98.7 | 0.6 |
| added to vial nivolumab SC injection and | 24 Hours | 110 | 0.7 | 98.7 | 0.6 |
| solution stored in syringe for 24 hours. | | | | | |
| Method 2: nivolumab SC injection | Initial | 120 | 0.7 | 98.7 | 0.6 |
| stored in syringe for 24 hours. | 24 Hours | 119 | 0.7 | 98.7 | 0.6 |

[0509] Table 19 presents test results for solution appearance, pH, binding activity and subvisible particulate matter. Solution pH and activity binding were both little changed throughout the study period. Subvisible particulate levels in the samples were low and there were no apparent trends.

TABLE 19
Test Results for Appearance, pH, Activity Binding ELISA and Subvisible Particulate Matter

| | | | | Activity | Subvisible Particulate Matter, | |
|---|---|---|---|---|---|---|
| | | | | Binding ELISA | Particles per Milliliter | |
| Preparation | Time | Appearance | pH | (%) | ≥10-μm | ≥25-μm |
| Method 1: 0.76 mL NS and | Initial | Complies(a) | 5.7 | 103 | 63 | 1 |
| 0.19 mL EDP added to vial nivohunab | 24 Hours | Complies | 5.8 | 110 | 15 | 0 |
| SC injection and solution stored in | | | | | | |
| syringe for 24 hours. | | | | | | |
| Method 2: nivohunab SC injection | Initial | Complies | 5.7 | 106 | 16 | 0 |
| stored in syringe for 24 hours. | 24 Hours | Complies | 5.8 | 109 | 47 | 0 |

(a)Complies indicates a slightly yellow, very opalescent solution, essentially free from visible particles.

[0510] Table 20 shows data for percent purity by CE-SDS and the sum of all minor peaks (≥0.3%). The results show that for all samples, the level of size variants was unchanged throughout the study period.

TABLE 20
Test Results for Size Variants

| | | CE-SDS-NR (%) | | CE-SDS-R (%) | |
|---|---|---|---|---|---|
| | | | Sum of All | | Sum of All |
| | | | Minor Peaks | | Minor Peaks |
| Preparation | Time | Purity | (≥0.3%) | Purity | (≥0.3%) |
| Method 1: 0.76 mL NS and 0.19 mL EDP | Initial | 98.1 | 1.2 | 98.9 | 0.8 |
| added to vial nivolumab SC injection and | 24 Hours | 98.0 | 1.5 | 98.9 | 0.9 |
| solution stored in syringe for 24 hours | | | | | |
| Method 2: nivolumab SC injection | Initial | 98.0 | 1.2 | 98.8 | 0.9 |
| stored in syringe for 24 hours. | 24 Hours | 98.1 | 1.2 | 98.9 | 0.9 |

[0511] Table 21 presents data for enzyme activity and charge variants by iCIEF. The results show that enzyme activity was relatively unchanged throughout the study period. The level of acidic species, main peak and basic species was unchanged during the 24-hour study period.

TABLE 21
Test Results for rHuPH20 Enzyme Activity and Charge Variants

| | | | Charge Variants by iCIEF | | |
|---|---|---|---|---|---|
| | | Enzyme | Acidic | Main | Basic |
| | | Activity | Species | Peak | Species |
| Preparation | Time | (Units/mL) | (%) | (%) | (%) |
| Method 1: 0.76 mL NS and 0.19 mL EDP | Initial | 2,164 | 35.0 | 60.3 | 4.7 |
| added to vial nivolumab SC injection and | 24 Hours | 2,070 | 34.9 | 60.3 | 4.8 |
| solution stored in syringe for 24 hours. | | | | | |
| Method 2: nivolumab SC injection | Initial | Not Tested | 34.5 | 60.5 | 4.9 |
| stored in syringe for 24 hours. | 24 Hours | Not Tested | 34.5 | 60.6 | 4.9 |

[0512] Based on the results of this use-time study, the following conclusions were made: 1. Nivolumab SC injection was stable when diluted with 0.76 mL 0.9% sodium chloride injection (NS) and 0.19 mL ENHANZE Drug Product (EDP) to a protein concentration of 109 mg/mL and stored in a plastic syringe for up to 24 hours at 2°-8° C., with 4 hours of the 24 hours at room temperature and room light; 2. Nivolumab SC injection, 120 mg/mL, was stable when stored in a plastic syringe for up to 24 hours at 2°-8° C., with 4 hours of the 24 hours at room temperature and room light; and 3. Nivolumab SC injection, diluted with NS and EDP to a protein concentration of 109 mg/mL and nivolumab SC injection, 120 mg/mL, was compatible with PVC administration components and was capable of being passed through syringe needles at flow rates as high as 4 milliliters per minute.

[0513] Commercial Formulation Development

[0514] In the initial clinical trials discussed supra, the rHuPH20 enzyme was added to the vial of nivolumab SC injection just prior to the subcutaneous administration of the dose to the patient. The present study evaluated addition of rHuPH20 to the formulation so that the dose could be prepared from a single vial for the commercial formulation of nivolumab SC injection.

[0515] In the initial clinical trials, ENHANZE® Drug Product (EDP, Halozyme Therapeutics) was added to the nivolumab and mixed, prior to being drawn up in the syringe. EDP is a sterile, non-pyrogenic, single-use, preservative-free, isotonic aqueous solution. The EDP provided 1 mg/mL rHuPH20 in a formulation containing 10 mM histidine, pH 6.5, 130 mM sodium chloride, 10 mM methionine, and 0.02% w/w polysorbate 80. EDP is packaged in 2-cc Type I flint glass vials, stoppered with chlorobutyl rubber stoppers, and sealed with aluminum seals.

[0516] For the co-formulated drug product, instead of EDP, rHuPH20 drug substance was be used in the formulation. This drug substance provided a higher rHuPH20 concentration of 10 mg/mL and was formulated with 10 mM histidine and 130 mM sodium chloride, pH 6.5. The rHuPH20 drug substance was supplied as a frozen solution in a bottle, that was thawed and gently mixed prior to use. As with the FIH clinical studies, the enzyme concentration in the commercial co-formulated drug product remained at 2,000 U/mL.

[0517] Initial Feasibility Study

[0518] An initial feasibility study was conducted to evaluate the stability of 100 mg/mL nivolumab in the presence of 2,000 U/mL rHuPH20 at 5° C., 25° C. and 40° C. when packaged in glass vials. Formulations were prepared with and without 2,000 U/mL rHuPH20, filled into 3-cc glass vials, stoppered, sealed and placed on station. The samples were tested at the initial timepoint and again at 1 week, 2 weeks and 4 weeks for solution appearance, pH, protein concentration, size homogeneity by SE-HPLC and subvisible particulate matter by HIAC. In addition, charge variants were determined by iCIEF, molecular weight distribution by CE-SDS (R&NR) and enzyme activity using a plate based turbidimetric method.

[0519] The results generated in this study, presented in Table 22 to 26, showed that the presence of 2,000 U/mL of rHuPH20 in the formulation had no impact on the quality attributes of nivolumab. Through 4 weeks of storage at 5° C., 25° C. and 40° C., there were no differences in solution appearance, pH, protein concentration or subvisible particulate levels when results for the enzyme containing formulation are compared to results for the enzyme free control. There were also no differences observed in results for size homogeneity by SE-HPLC, charge variants by iCIEF or molecular weight variants by CE-SDS (R&NR). Comparable results for enzyme activity were observed at 5° C. and 25° C., but due to the relatively low Tm of the enzyme, there was a rapid decrease in activity when stored at the 40° C. condition.

TABLE 22
Test Results for Solution Appearance, Protein Concentration and pH for Samples
Stored at 5° C., 25° C. and 40° C. for Four Weeks

| | | Solution Appearance | | Protein Concentration (mg/mL) | | Solution pH | |
|---|---|---|---|---|---|---|---|
| Storage | Time | With | Without | With | Without | With | Without |
| Cond. | (Weeks) | rHuPH20 | rHuPH20 | rHuPH20 | rHuPH20 | rHuPH20 | rHuPH20 |
| Initial | 0 | Complies^{a} | Complies | 101 | 102 | 6.15 | 6.15 |
| 5° C. | 1 | Complies | Complies | 101 | 102 | 6.15 | 6.18 |
| | 2 | Complies | Complies | 101 | 101 | 6.15 | 6.16 |
| | 4 | Complies | Complies | 101 | 101 | 6.17 | 6.18 |
| 25° C. | 1 | Complies | Complies | 102 | 101 | 6.17 | 6.16 |
| | 2 | Complies | Complies | 101 | 100 | 6.17 | 6.14 |
| | 4 | Complies | Complies | 99 | 102 | 6.17 | 6.17 |
| 40° C. | 1 | Complies | Complies | 101 | 102 | 6.16 | 6.15 |
| | 2 | Complies | Complies | 102 | 102 | 6.16 | 6.16 |
| | 4 | Complies | Complies | 101 | 101 | 6.18 | 6.18 |

^{a}Clear to slightly opalescent, colorless to pale-yellow solution

TABLE 23
Test Results for High Molecular Weight Species, Low Molecular Weight Species
and Enzyme Activity Samples Stored at 5° C., 25° C. and 40° C. for Four Weeks

| | | SE-HPLC HMWS (Area %) | | SE-HPLC LMWS (Area %) | | Enzyme Activity (Units/mL) | |
|---|---|---|---|---|---|---|---|
| Storage | Time | With | Without | With | Without | With | Without |
| Cond. | (Weeks) | rHuPH20 | rHuPH20 | rHuPH20 | rHuPH20 | rHuPH20 | rHuPH20 |
| Initial | 0 | 0.54 | 0.56 | 0.05 | 0.05 | 2,209 | N/A ^{a} |
| 5° C. | 1 | 0.59 | 0.58 | 0.06 | 0.07 | 2,212 | N/A |
| | 2 | 0.61 | 0.60 | 0.07 | 0.07 | 2,288 | N/A |
| | 4 | 0.64 | 0.63 | 0.08 | 0.07 | 2,263 | N/A |
| 25° C. | 1 | 0.70 | 0.70 | 0.07 | 0.07 | 2,219 | N/A |
| | 2 | 0.78 | 0.77 | 0.07 | 0.07 | 2,236 | N/A |
| | 4 | 0.87 | 0.86 | 0.07 | 0.08 | 2,202 | N/A |
| 40° C. | 1 | 0.98 | 0.96 | 0.08 | 0.07 | 497 | N/A |
| | 2 | 1.18 | 1.16 | 0.08 | 0.09 | ND ^{b} | N/A |
| | 4 | 1.52 | 1.51 | 0.09 | 0.09 | ND | N/A |

^{a} Not applicable,
^{b} Not detected

TABLE 24
Test Results for Charge Variants by iCIEF for Samples Stored at 5°
C., 25° C. and 40° C. for Four Weeks

| | | Acidic Group (Area %) | | Main Peak (Area %) | | Basic Group (Area %) | |
|---|---|---|---|---|---|---|---|
| Storage | Time | With | Without | With | Without | With | Without |
| Cond. | (Weeks) | rHuPH20 | rHuPH20 | rHuPH20 | rHuPH20 | rHuPH20 | rHuPH20 |
| Initial | 0 | 31.4 | 31.5 | 64.3 | 64.8 | 4.3 | 3.7 |
| 5° C. | 1 | 31.3 | 31.6 | 64.8 | 65.3 | 3.9 | 3.1 |
| | 2 | 32.2 | 31.9 | 64.0 | 63.8 | 3.8 | 4.2 |
| | 4 | 32.2 | 32.3 | 63.6 | 63.6 | 4.3 | 4.1 |
| 25° C. | 1 | 31.5 | 31.1 | 64.8 | 65.2 | 3.7 | 3.7 |
| | 2 | 33.0 | 33.1 | 62.6 | 62.3 | 4.4 | 4.6 |
| | 4 | 33.8 | 33.6 | 61.5 | 61.8 | 4.7 | 4.7 |
| 40° C. | 1 | 34.7 | 33.9 | 60.6 | 61.2 | 4.7 | 5.0 |
| | 2 | 39.4 | 39.5 | 54.4 | 54.4 | 6.3 | 6.1 |
| | 4 | 47.0 | 47.4 | 45.8 | 45.7 | 7.2 | 6.9 |

TABLE 25
Test Results for Size Variants by CE-SDS (Reduced
and Non-Reduced) for Samples Stored at 5°
C., 25° C. and 40° C. for Four Weeks

| | | Percent Purity, | | Percent Purity, | |
|---|---|---|---|---|---|
| | | CE-SDS (R) (Area %) | | CE-SDS (NR) (Area %) | |
| Storage | Time | With | Without | With | Without |
| Cond. | (Weeks) | rHuPH20 | rHuPH20 | rHuPH20 | rHuPH20 |
| Initial | 0 | 100.0 | 100.0 | 98.4 | 98.5 |
| 5° C. | 1 | 100.0 | 100.0 | 98.4 | 98.5 |
| | 2 | 100.0 | 100.0 | 98.7 | 98.7 |
| | 4 | 100.0 | 100.0 | 99.3 | 99.3 |
| 25° C. | 1 | 100.0 | 100.0 | 98.4 | 98.4 |
| | 2 | 100.0 | 100.0 | 98.8 | 98.8 |
| | 4 | 100.0 | 100.0 | 99.3 | 99.4 |
| 40° C. | 1 | 100.0 | 100.0 | 98.4 | 98.4 |
| | 2 | 99.8 | 99.8 | 98.3 | 98.2 |
| | 4 | 99.8 | 99.8 | 98.9 | 98.9 |

TABLE 26
Test Results for Subvisible Particulate Matter
by HIAC for Samples Stored at 5° C.,
25° C. and 40° C. for Four Weeks

| | | Particles per | | Particles per | |
|---|---|---|---|---|---|
| | | mL, ≥10-μm | | mL, ≥25-μm | |
| Storage | Time | With | Without | With | Without |
| Cond. | (Weeks) | rHuPH20 | rHuPH20 | rHuPH20 | rHuPH20 |
| Initial | 0 | 3 | 3 | 0 | 0 |
| 5° C. | 1 | 4 | 3 | 3 | 1 |
| | 2 | 3 | 0 | 0 | 0 |
| | 4 | 1 | 4 | 0 | 0 |
| 25° C. | 1 | 0 | 4 | 0 | 2 |
| | 2 | 3 | 1 | 0 | 0 |
| | 4 | 5 | 0 | 0 | 0 |
| 40° C. | 1 | 6 | 9 | 0 | 0 |
| | 2 | 5 | 1 | 1 | 0 |
| | 4 | 1 | 5 | 0 | 0 |

[0520] Development of the Commercial Formulation—Addition of rHuPH20

[0521] The primary objective in the development of the commercial formulation for nivolumab SC injection was the addition of rHuPH20 to the FIH clinical formulation. As with FIH dosing, the target enzyme activity in the commercial drug product was 2,000 units per milliliter. The rHuPH20 drug substance has a target protein concentration of 10 mg/ml, a target enzyme activity of 110,000 units per milligram and a density of 1.010 g/mL at 20° C. Thus, for an enzyme activity of 2,000 units/mL, the theoretical amount of rHuPH20 drug substance needed per liter of finished drug product is: 2,000 kU/L of DP×1 mg rHuPH20/110 kU×1 mL/10 mg×1.010 g/mL=1.84 g/L.

[0522] The 1.84 g of rHuPH20 drug substance per liter of drug product results in a drug product enzyme concentration of 0.0182 mg/mL, from: 1.84 g/L×1 mL/1.010 g×10 mg/mL×1 L/1,000 mL=0.0182 mg rHuPh20/mL of drug product.

[0523] The actual amount of rHuPH20 drug substance added during manufacture of the drug product is determined based on the protein concentration and the enzyme activity of the rHuPH20 drug substance, which can range from 8.5 to 12.5 mg/mL and 80 to 140 kU/mg, respectively.

[0524] Addition of Methionine as a Sacrificial Antioxidant

[0525] To prevent oxidation of rHuPH20, a study was conducted where methionine was added to the formulation as a sacrificial antioxidant. To stress the formulation, peroxide was added at a concentration of 1 mM to formulations containing methionine at concentrations of 0 mM, 5 mM and 10 mM. The 1 mM level of peroxide was selected based on information in the literature stating that approximately 0.15 mM of peroxide can be formed in a solution containing 0.05% w/v polysorbate 80 when stored at 40° C. for up to 5 weeks.

[0526] In this experiment solutions were prepared with nivolumab concentrations of 120 mg/mL in 20 mM histidine buffer, pH 6.0, with 250 mM sucrose, 0.05% w/v polysorbate 80, 50 μM pentetic acid and 2,000 U/mL rHuPH20. Peroxide and methionine concentrations in each solution were adjusted as follows: 1. Formulation A: No peroxide, no methionine; 2. Formulation B: No peroxide, 10 mM methionine; 3. Formulation C: 1 mM peroxide, no methionine; 4. Formulation D: 1 mM peroxide, 5 mM methionine; and 5. Formulation E: 1 mM peroxide, 10 mM methionine

[0527] Samples were placed on station at the accelerated condition of 25° C. and monitored for up to 6 months. The appearance of all samples remained clear to slightly opalescent, colorless to pale-yellow. Additional stability results are presented in Table 27. The data show essentially no differences in formulation pH, nivolumab concentration or level of high molecular weight and low molecular weight species were observed. Additionally, the level of subvisible particulates for all samples was low, with no apparent trends. The one difference observed was that the enzyme activity of Formulation C, which contained peroxide but no methionine, was significantly lower than that in the other 4 formulations. Even with 1 mM peroxide in the formulation, enzyme activity was completely preserved for both Formulations D and E. Based on the results of this stability study, a methionine concentration of 5 mM was selected for the commercial drug product.

TABLE 27
Effect of 1 mM Peroxide on the Stability Nivolumab SC Injection Stored
for 6 Months at 25° C. for Samples With and Without Added Methionine

| | | | Protein | | | Enzyme | Subvisible Particulate Matter | |
|---|---|---|---|---|---|---|---|---|
| | Time | | Conc. | HMWS | LMWS | Activity | (Particles per Milliliter) | |
| Formulation | (Months) | pH | (mg/mL) | (Area %) | (Area %) | (U/mL) | ≥10-μm | ≥25-μm |
| Formulation A | 0 | 5.94 | 117 | 0.63 | 0.06 | 2,266 | 1 | 0 |
| (no peroxide, | 1 | 5.96 | 119 | 0.93 | 0.08 | 2,130 | 9 | 0 |
| no methionine) | 3 | 5.99 | 116 | 1.12 | 0.08 | 2,031 | 11 | 1 |
| | 6 | 5.94 | 118 | 1.21 | 0.12 | 2,015 | 14 | 0 |
| Formulation B | 0 | 5.93 | 118 | 0.62 | 0.06 | 2,292 | 0 | 0 |
| (no peroxide, | 1 | 5.95 | 118 | 0.90 | 0.07 | 2,262 | 3 | 0 |
| 10 mM methionine) | 3 | 5.97 | 119 | 1.09 | 0.08 | 2,055 | 9 | 0 |
| | 6 | 5.94 | 119 | 1.18 | 0.13 | 2,023 | 10 | 0 |
| Formulation C | 0 | 5.93 | 119 | 0.62 | 0.07 | 2,248 | 0 | 0 |
| (1 mM peroxide, | 1 | 5.94 | 117 | 0.89 | 0.08 | 2,038 | 6 | 0 |
| no methionine) | 3 | 5.96 | 118 | 1.08 | 0.09 | 1,856 | 13 | 0 |
| | 6 | 5.92 | 116 | 1.19 | 0.13 | 1,792 | 11 | 0 |
| Formulation D | 0 | 5.92 | 117 | 0.62 | 0.06 | 2,261 | 0 | 0 |
| (1 mM peroxide, | 1 | 5.94 | 119 | 0.92 | 0.09 | 2,239 | 5 | 0 |
| 5 mM methionine) | 3 | 5.99 | 120 | 1.10 | 0.08 | 2,081 | 24 | 0 |
| | 6 | 5.91 | 116 | 1.18 | 0.12 | 2,044 | 8 | 0 |
| Formulation E | 0 | 5.93 | 118 | 0.62 | 0.06 | 2,285 | 0 | 0 |
| (1 mM peroxide, | 1 | 5.94 | 119 | 0.90 | 0.08 | 2,211 | 10 | 0 |
| 10 mM methionine) | 3 | 5.97 | 117 | 1.08 | 0.08 | 2,036 | 9 | 0 |
| | 6 | 5.95 | 121 | 1.17 | 0.13 | 2,047 | 8 | 0 |

[0528] Stability of Nivolumab SC Injection when Formulation is Spiked with 1.5 ppm Metal—Assessing the Protective Effect of Pentetic Acid and Methionine

[0529] As discussed previously, 50 μM pentetic acid was selected as a component of the formulation to prevent trace metal catalyzed degradation of nivolumab and 5 mM methionine was chosen as a sacrificial antioxidant to prevent peroxide induced oxidation of rHuPH20. A study was conducted to evaluate the impact on the stability of nivolumab SC injection when both of these excipients were included in the formulation. In this experiment, solutions were prepared with nivolumab concentrations of 120 mg/mL in 20 mM histidine buffer, pH 6.0, with 250 mM sucrose and 0.05% w/v polysorbate 80. Pentetic acid and methionine concentrations in each formulation were adjusted as follows: 1. Formulation A: No pentetic acid, no methionine; 2. Formulation B: 50 μM pentetic acid, no methionine; 3. Formulation C: No pentetic acid, 5 mM methionine; and 4. Formulation D: 50 μM pentetic acid, 5 mM methionine.

[0530] Each formulation was spiked with a concentrated metal solution such that the final formulation concentration of metal was 1.5 ppm (0.5 ppm each of iron, chromium and copper). Samples of each formulation were filled into vials, placed on station at the stressed condition of 40° C. and monitored for up to 2 months. The appearance of all samples remained clear to slightly opalescent, colorless to pale-yellow. Additional stability results presented in Table 28 show no differences in formulation pH, nivolumab concentration or level of subvisible particulates. After 2 months of storage at 40° C., the level of high molecular weight species was the greatest in Formulation A, which contained neither pentetic acid nor methionine and was lowest in Formulation D that contained both of these excipients. Comparing the level of HMWS in Formulation B vs C shows that 50 μM pentetic acid was more protective against HMWS formation than 5 mM methionine. The results of this study therefore support the inclusion of both 50 μM pentetic acid and 5 mM methionine in the commercial formulation for nivolumab SC injection.

TABLE 28
Effect of 1.5 ppm Metal on the Stability Nivolumab SC Injection Stored for 2 Months
at 40° C. for Samples With and Without 50 μM Pentetic Acid or 5 mM Methionine

| | | | Protein | | | Subvisible Particulate Matter | |
|---|---|---|---|---|---|---|---|
| | Time | | Conc. | HMWS | LMWS | (Particles per Milliliter) | |
| Formulation | (Months) | pH | (mg/mL) | (Area %) | (Area %) | ≥10-μm | ≥25-μm |
| Formulation A | 0 | 5.94 | 117 | 0.68 | 0.08 | 2 | 1 |
| (1.5 ppm metal spike, | 1 | 5.97 | 117 | 3.55 | 0.17 | 10 | 0 |
| no pentetic acid, | 2 | 5.93 | 118 | 6.01 | 0.28 | 9 | 2 |
| no methionine) | | | | | | | |
| Formulation B | 0 | 5.97 | 116 | 0.68 | 0.07 | 5 | 0 |
| (1.5 ppm metal spike, | 1 | 5.93 | 118 | 2.03 | 0.13 | 6 | 0 |
| 50 μM pentetic acid, | 2 | 5.95 | 116 | 3.37 | 0.18 | 10 | 0 |
| no methionine) | | | | | | | |
| Formulation C | 0 | 5.95 | 119 | 0.68 | 0.08 | 2 | 0 |
| (1.5 ppm metal spike, | 1 | 5.93 | 119 | 2.93 | 0.15 | 9 | 0 |
| no pentetic acid, | 2 | 5.96 | 118 | 5.18 | 0.25 | 10 | 1 |
| 5 mM methionine) | | | | | | | |
| Formulation D | 0 | 5.95 | 119 | 0.68 | 0.07 | 4 | 0 |
| (1.5 ppm metal spike, | 1 | 5.95 | 116 | 1.83 | 0.12 | 8 | 0 |
| 50 μM pentetic acid, | 2 | 5.92 | 119 | 2.87 | 0.18 | 5 | 0 |
| 5 mM methionine) | | | | | | | |

[0531] IND Enabling Stability Batch for Commercial Formulation

[0532] A laboratory batch of nivolumab SC injection, 120 mg/mL (commercial formulation) was manufactured and placed on stability. The formulation was 120 mg/mL nivolumab in 20 mM histidine buffer pH 6.0, with 250 mM sucrose, 0.05% w/v polysorbate 80, 50 μM pentetic acid, 5 mM methionine and 2,000 Units/mL rHuPH20. The batch size was 3,000 mL in size and it yielded 368 vials after inspection (800 mL from this batch were used for other development activities). The drug product was filled (target fill of 5.67 mL, label strength of 600 mg/vial) into Schott 10R Type I flint glass vials which were closed with 20-mm Daikyo D-21-7-S Flurotec coated butyl rubber stoppers. The vials were sealed with 20-mm West aluminum seals with flip-off caps. The drug product vials were placed on station at 5° C., 25° C. and 40° C. At specified timepoints, samples were pulled from the stability station and tested. Twelve months of IND stability data are presented in Table 29 to Table 32.

[0533] The visual appearance for all samples at all timepoints complied with specification (clear to very opalescent, colorless to yellow liquid, light (few) particulates (consistent in appearance to protein particulates) may be present). Additional stability data are provided in Tables 29 to 32. As shown in Table 29, there were no changes observed in pH or protein concentration throughout the study. Over 12 months of storage at 5° C., the level of HMWS increased by 1.X %. At the accelerated 25° C. condition, after 6 months of storage the level of HMWS increased by 0.6%. At the 40° C. stress condition, the level of HMWS increased over 3 months of storage by 3.3%. The level of LMWS was little changed for samples stored at 5° C. and 25° C., but increased by 1.1% for samples stored for 3 months at 40° C.

TABLE 29
Stability Data for Nivolumab SC Injection, 600 mg/vial (120 mg/mL)

| | | | | Nivolumab | SE-HPLC | | |
|---|---|---|---|---|---|---|---|
| Storage | Time | | Solution | Concentration | HMWS | Monomer | LMWS |
| Cond. | (Months) | Appearance | pH | (mg/mL) | (Area %) | (Area %) | (Area %) |
| Initial | 0 | Complies^{a} | 5.8 | 123.3 | 0.6 | 99.3 | 0.1 |
| 5° C. | 1 | Complies | 5.8 | 124.5 | 0.9 | 99.0 | 0.1 |
| | 3 | Complies | 5.9 | 128.2 | 0.8 | 99.1 | <0.1 |
| | 6 | Complies | 5.8 | 130.9 | 0.8 | 99.0 | 0.2 |
| | 9 | Complies | 5.8 | 125.7 | 0.8 | | |
| | 12 | Complies | 5.9 | 121.6 | | | |
| 25° C./ | 1 | Complies | 5.8 | 127.2 | 1.0 | 98.9 | 0.1 |
| 60% RH | 3 | Complies | 5.9 | 127.5 | 1.1 | 98.7 | 0.1 |
| | 6 | Complies | 5.8 | 129.9 | 1.3 | 98.5 | 0.2 |
| 40° C./ | 0.5 | Complies | 5.9 | 123.0 | 1.0 | 98.9 | 0.1 |
| 75% RH | 1 | Complies | 5.8 | 124.7 | 1.6 | 98.3 | 0.1 |
| | 3 | Complies | 5.9 | 126.1 | 3.1 | 95.9 | 1.0 |

^{a}Complies = Clear to very opalescent, colorless to yellow liquid, light (few) particulates (consistent in appearance to protein particulates) may be present.

[0534] Table 30 presents data for size variants by CE-SDS, both reduced and non-reduced. Over 12 months of storage at 5° C., percent purity by both reduced and non-reduced CE-SDS was unchanged. At the accelerated 25° C. condition, over 6 months of storage, percent purity by reduced CE-SDS decreased by 0.2%. At the 40° C. stress condition, the percent purity by reduced CE-SDS decreased over 3 months of storage by 2.9%. For non-reduced CE-SDS, percent purity decreased by 1.2% over 6 months of storage at 25° C. and by 4.4% at the 40° C. stress condition.

TABLE 30
Stability Data for Nivolumab SC Injection,
600 mg/vial (120 mg/mL)

| | | CE-SDS (Reduced) | | CE-SDS (Non-Reduced) | |
|---|---|---|---|---|---|
| | | | Sum of | | Sum of |
| | | | Minor | | Minor |
| | | | Peaks ≥ | | Peaks ≥ |
| Storage | Time | Purity | LOQ | Purity | LOQ |
| Cond. | (Months) | (Area %) | (Area %) | (Area %) | (Area %) |
| Initial | 0 | 100.0 | <1 | 99.0 | 1.0 |
| 5° C. | 1 | 99.6 | <0.5 | 98.7 | 0.9 |
| | 3 | 99.7 | <0.5 | 98.6 | 0.9 |
| | 6 | 99.7 | <0.5 | 98.4 | 0.9 |
| | 9 | | | | |
| | 12 | | | | |
| 25° C./ | 1 | 99.6 | <0.5 | 99.3 | 0.7 |
| 60% RH | 3 | 99.4 | <0.5 | 97.9 | 1.5 |
| | 6 | 99.4 | <0.5 | 97.9 | 1.5 |
| 40° C./ | 0.5 | 99.2 | <0.5 | 98.3 | 0.5 |
| 75% RH | 1 | 99.2 | <0.5 | 97.0 | 2.2 |
| | 3 | 97.1 | 2.0 | 94.1 | 5.0 |

[0535] The level of acidic species increased with time at all storage conditions. Over 12 months of storage at 5° C., acidic species increased by 1.5%. At the accelerated 25° C. condition, acidic species increased by 11.3% over 6 months of storage. At the 40° C. stress condition, the level of acidic species increased over 3 months of storage by 38.8%. The level of basic species was little changed throughout the 12 months of storage at 5° C. At the 25° C. condition the level of basic species increased by 1.6% over 6 months and after 3 months of storage at 40° C., the level of basic species increased by 2.6%. The increases in acidic and basic species were accompanied by an approximately equal decrease in main peak area.

TABLE 31
Stability Data for Nivolumab SC Injection, 600 mg/vial (120 mg/mL)

| | | iCIEF | | | | |
|---|---|---|---|---|---|---|
| | | Acidic | Main | Basic | Polysorbate | Enzyme |
| Storage | Time | Group | Peak | Group | 80 | Activity |
| Cond. | (Months) | (Area %) | (Area %) | (Area %) | (% w/v) | (Units/mL) |
| Initial | 0 | 31.9 | 63.5 | 4.6 | 0.04 | 2,110 |
| 5° C. | 1 | 33.5 | 61.7 | 4.8 | — | 2129 |
| | 3 | 33.2 | 61.8 | 4.9 | — | 2079 |
| | 6 | 35.6 | 60.0 | 4.4 | — | 1910 |
| | 12 | | | | | |
| 25° C./ | 1 | 35.2 | 59.2 | 5.6 | — | 2087 |
| 60% RH | 3 | 38.5 | 55.4 | 6.1 | — | 2105 |
| | 6 | 47.6 | 47.0 | 5.5 | 0.04 | 1870 |
| 40° C./ | 0.5 | 37.2 | 55.6 | 7.3 | — | 900 |
| 75% RH | 1 | 46.8 | 45.4 | 7.8 | — | 487 |
| | 3 | 66.7 | 25.5 | 7.8 | 0.04 | NR |

[0536] Table 32 presents results for activity binding ELISA, cell-based bioassay and subvisible particulates. Across all temperatures and timepoints, results for activity binding ELISA range from 95% to 112% and for cell-based bioassay range from 79% to 105%. The level of subvisible particulates for all samples at all timepoints was low and there were no apparent trends.

TABLE 32
Stability Data for Nivolumab SC Injection,
600 mg/vial (120 mg/mL)

| | | | | Particluate Matter | |
|---|---|---|---|---|---|
| | | Activity | | Particles/ | Particles/ |
| Storage | Time | Binding | Cell-based | Vial ≥10 | Vial ≥25 |
| Cond. | (Months) | ELISA % | Bioassay % | microns | microns |
| Initial | 0 | 110 | 93 | 53 | 0 |
| 5° C. | 1 | 103 | 94 | 15 | 0 |
| | 3 | 102 | 88 | 33 | 0 |
| | 6 | 97 | 87 | 18 | 2 |
| | 9 | 102 | 91 | | |
| | 12 | 95 | 93 | | |
| 25° C./ | 1 | 95 | 86 | 35 | 2 |
| 60% RH | 3 | 92 | 77 | 48 | 0 |
| | 6 | 99 | 77 | 25 | 0 |
| 40° C./ | 0.5 | 100 | 82 | 80 | 0 |
| 75% RH | 1 | 100 | 88 | 27 | 0 |
| | 3 | 97 | 89 | 32 | 0 |

[0537] Formulation Robustness

[0538] A study was performed to examine the robustness of the formulation selected for the commercial drug product. The study design called for the preparation of 13 different formulations. Nine formulations were prepared for main effects screening, two formulations were prepared at target and two axial runs were prepared to determine the effect of protein concentration. Extra vials were prepared for one of the target formulation and stored frozen at −60° C. These frozen samples were thawed and tested at each timepoint in order to assess analytical (between timepoint) variation. Five factors were varied in the prepared formulations and included protein concentration (105 mg/mL to 135 mg/mL), pH (5.5 to 6.5), polysorbate 80 concentration (0.025% w/v to 0.075% w/v), pentetic acid concentration (25 μM to 75 μM and methionine concentration (2.5 mM to 7.5 mM). The formulations that were prepared for the robustness study are presented in Table 33.

TABLE 33
Formulations Prepared for Robustness Study

| | | Protein | | PS80 | Pentetic | Methionine |
|---|---|---|---|---|---|---|
| Form. | | Conc. | | Conc. | Acid Conc. | Conc. |
| Number | Formulation Description | (mg/mL) | pH | (% w/v) | (μM) | (mM) |
| 1 | Main Effects Screening | 135 | 6.5 | 0.075 | 75 | 7.5 |
| 2 | Main Effects Screening | 105 | 6.5 | 0.025 | 25 | 7.5 |
| 3 | Axial for Protein Conc. | 105 | 6.0 | 0.050 | 50 | 5.0 |
| 4 | Center Point | 120 | 6.0 | 0.050 | 50 | 5.0 |
| 5 | Main Effects Screening | 135 | 5.5 | 0.025 | 75 | 2.5 |
| 6 | Center Point | 120 | 6.0 | 0.050 | 50 | 5.0 |
| 7 | Main Effects Screening | 135 | 6.5 | 0.025 | 25 | 2.5 |
| 8 | Main Effects Screening | 135 | 5.5 | 0.075 | 25 | 7.5 |
| 9 | Main Effects Screening | 105 | 5.5 | 0.075 | 25 | 2.5 |
| 10 | Main Effects Screening | 105 | 5.5 | 0.025 | 25 | 2.5 |
| 11 | Main Effects Screening | 105 | 5.5 | 0.025 | 75 | 7.5 |
| 12 | Main Effects Screening | 105 | 6.5 | 0.075 | 75 | 2.5 |
| 13 | Axial for Protein Conc. | 135 | 6.0 | 0.050 | 50 | 5.0 |
| 14 | Center Point (Stored at −60° C.) | 120 | 6.0 | 0.050 | 50 | 5.0 |

[0539] The formulations were prepared by first thawing approximately one liter of purified drug substance (150 g/L nivolumab in 20 mM histidine, 250 mM sucrose, pH 6.0). Tangential flow filtration was then used to exchange buffer and adjust one-half of the bulk to pH 5.5 and the other half to pH 6.5. For the middle target of pH 6.0, purified drug substance at pH 5.5 was added to purified drug substance at pH 6.5 until the target pH of 6.0 was reached. For each of the 14 formulations, a volume of 50 mL was prepared. The concentrations of polysorbate 80, pentetic acid and methionine in each formulation were adjusted by the addition of varying amounts of concentrated spike solutions. After preparation, each formulation was passed through a 0.22-μm sterilizing filter, then filled into 3-cc glass vials which were stoppered and sealed. The filled vials were then placed on station at the recommended storage condition of 5° C. and also at the accelerated stability condition of 25° C.

[0540] Samples from each group were tested at the initial timepoint for solution appearance, pH, protein concentration, size homogeneity by SE-HPLC and subvisible particulate matter by HIAC. In addition, charge variants were determined by iCIEF, molecular weight distribution by CE-SDS (R&NR) and enzyme activity using a plate based turbidimetric method. Samples were again tested after 1 month and 3 months of storage at the accelerated condition of 25° C. and after 6 months and 12 months of storage at 5° C. Stability results are presented in Table 34 to Table 39.

[0541] At the initial timepoint, across all four groups, there were no changes in solution appearance, pH or nivolumab concentration. Similar initial results were observed for size homogeneity by SE-HPLC, charge variants by iCIEF, size variants by CE-SDS (R&NR) and enzyme activity for Groups 1, 3 and 4. The level of HMWS for Group 2 samples (room temperature, room light and 30° C. storage) was 0.21% higher than the control and the level of acidic species for Group 2 samples was 1.4% higher than the control. Subvisible particulate matter by HIAC was very low for all samples. Enzyme activity for the Group 2 sample was 2.5% lower than that of the control at the initial timepoint.

[0542] After six months of storage at the accelerated condition of 25° C., across all four groups, there were no changes in solution appearance, pH or nivolumab concentration. The level of HMWS for Groups 1, 3 and 4 was similar and the level of HWWS for Group 2 was 0.15% higher than that of the control. The level of LMWS was identical at 0.13% for all four groups. For charge variants by iCIEF, the level of acidic species for Group 2 was 2.7% higher than that of the control and was similar to the control for Groups 1 and 3. Basic species across all four groups ranged from 5.9% to 6.0% at the six month timepoint. The level of molecular size variants across all four groups was in the range of 99.7% to 99.8% for reduced CE-SDS and in the range of 96.5% to 97.2% for non-reduced CE-SDS. At the six month timepoint, subvisible particulate matter count by HIAC was very low for all samples, with no apparent trends and enzyme activity for all groups was determined to be within 99.2% and 105.6% of the control.

TABLE 34
Stability Data for Nivolumab SC Injection - Stored at 25° C.

| | Time | | | Nivolumab | SE-HPLC | | |
|---|---|---|---|---|---|---|---|
| | (Months | | Solution | Concentration | HMWS | Monomer | LMWS |
| Formulation | at 25° C.) | Appearance | pH | (mg/mL) | (Area %) | (Area %) | (Area %) |
| 1 | 0 | Complies(a) | 6.46 | 127 | 0.72 | 99.17 | 0.10 |
| | 1 | Complies | | | | | |
| | 3 | Complies | | | | | |
| 2 | 0 | Complies | 6.41 | 102 | 0.66 | 99.22 | 0.12 |
| | 1 | Complies | | | | | |
| | 3 | Complies | | | | | |
| 3 | 0 | Complies | 5.99 | 102 | 0.62 | 99.27 | 0.11 |
| | 1 | Complies | | | | | |
| | 3 | Complies | | | | | |
| 4 | 0 | Complies | 5.97 | 117 | 0.62 | 99.28 | 0.09 |
| | 1 | Complies | | | | | |
| | 3 | Complies | | | | | |
| 5 | 0 | Complies | 5.49 | 133 | 0.59 | 99.32 | 0.09 |
| | 1 | Complies | | | | | |
| | 3 | Complies | | | | | |
| 6 | 0 | Complies | 5.96 | 118 | 0.62 | 99.28 | 0.10 |
| | 1 | Complies | | | | | |
| | 3 | Complies | | | | | |
| 7 | 0 | Complies | 6.46 | 132 | 0.73 | 99.15 | 0.12 |
| | 1 | Complies | | | | | |
| | 3 | Complies | | | | | |
| 8 | 0 | Complies | 5.49 | 129 | 0.58 | 99.32 | 0.10 |
| | 1 | Complies | | | | | |
| | 3 | Complies | | | | | |
| 9 | 0 | Complies | 5.57 | 103 | 0.57 | 99.34 | 0.10 |
| | 1 | Complies | | | | | |
| | 3 | Complies | | | | | |
| 10 | 0 | Complies | 5.56 | 103 | 0.57 | 99.35 | 0.08 |
| | 1 | Complies | | | | | |
| | 3 | Complies | | | | | |
| 11 | 0 | Complies | 5.55 | 102 | 0.57 | 99.32 | 0.11 |
| | 1 | Complies | | | | | |
| | 3 | Complies | | | | | |
| 12 | 0 | Complies | 6.42 | 102 | 0.70 | 99.20 | 0.10 |
| | 1 | Complies | | | | | |
| | 3 | Complies | | | | | |
| 13 | 0 | Complies | 6.00 | 130 | 0.66 | 99.25 | 0.09 |
| | 1 | Complies | | | | | |
| | 3 | Complies | | | | | |
| 14 | 0 | Complies | 5.98 | 116 | 0.65 | 99.24 | 0.12 |
| | 1 | Complies | | | | | |
| | 3 | Complies | | | | | |

(a)Complies = Clear to slightly opalescent, colorless to pale-yellow solution

TABLE 35
Stability Data for Nivolumab SC Injection - Stored at 25° C.

| | | iCIEF | | | |
|---|---|---|---|---|---|
| | Time | Acidic | Main | Basic | Enzyme |
| Formu- | (Months | Group | Peak | Group | Activity |
| lation | at 25° C.) | (Area %) | (Area %) | (Area %) | (Units/mL) |
| 1 | 0 | 35.6 | 59.8 | 4.7 | 1,956 |
| | 1 | | | | |
| | 3 | | | | |
| 2 | 0 | 35.6 | 59.8 | 4.7 | 1,956 |
| | 1 | | | | |
| | 3 | | | | |
| 3 | 0 | 35.6 | 59.8 | 4.7 | 1,956 |
| | 1 | | | | |
| | 3 | | | | |
| 4 | 0 | 35.6 | 59.8 | 4.7 | 1,956 |
| | 1 | | | | |
| | 3 | | | | |
| 5 | 0 | 35.6 | 59.8 | 4.7 | 1,956 |
| | 1 | | | | |
| | 3 | | | | |
| 6 | 0 | 35.6 | 59.8 | 4.7 | 1,956 |
| | 1 | | | | |
| | 3 | | | | |
| 7 | 0 | 35.6 | 59.8 | 4.7 | 1,956 |
| | 1 | | | | |
| | 3 | | | | |
| 8 | 0 | 35.6 | 59.8 | 4.7 | 1,956 |
| | 1 | | | | |
| | 3 | | | | |
| 9 | 0 | 35.6 | 59.8 | 4.7 | 1,956 |
| | 1 | | | | |
| | 3 | | | | |
| 10 | 0 | 35.6 | 59.8 | 4.7 | 1,956 |
| | 1 | | | | |
| | 3 | | | | |
| 11 | 0 | 35.6 | 59.8 | 4.7 | 1,956 |
| | 1 | | | | |
| | 3 | | | | |
| 12 | 0 | 35.6 | 59.8 | 4.7 | 1,956 |
| | 1 | | | | |
| | 3 | | | | |
| 13 | 0 | 35.6 | 59.8 | 4.7 | 1,956 |
| | 1 | | | | |
| | 3 | | | | |
| 14 | 0 | 35.6 | 59.8 | 4.7 | 1,956 |
| | 3 | | | | |
| | 6 | | | | |

TABLE 36
Stability Data for Nivolumab SC Injection - Stored at 25° C.

| | | CE-SDS | CE-SDS | Particluate Matter | |
|---|---|---|---|---|---|
| | Time | (R) | (NR) | Particles/ | Particles/ |
| Formu- | (Months | Purity | Purity | mL ≥10 | mL ≥25 |
| lation | at 25° C.) | (Area %) | (Area %) | microns | microns |
| 1 | 0 | 100.0 | 98.8 | 1 | 0 |
| | 1 | | | | |
| | 3 | | | | |
| 2 | 0 | 100.0 | 98.8 | 5 | 1 |
| | 1 | | | | |
| | 3 | | | | |
| 3 | 0 | 100.0 | 98.8 | 3 | 1 |
| | 1 | | | | |
| | 3 | | | | |
| 4 | 0 | 100.0 | 98.8 | 6 | 3 |
| | 1 | | | | |
| | 3 | | | | |
| 5 | 0 | 100.0 | 98.8 | 0 | 0 |
| | 1 | | | | |
| | 3 | | | | |
| 6 | 0 | 100.0 | 98.8 | 1 | 0 |
| | 1 | | | | |
| | 3 | | | | |
| 7 | 0 | 100.0 | 98.8 | 1 | 1 |
| | 1 | | | | |
| | 3 | | | | |
| 8 | 0 | 100.0 | 98.8 | 1 | 0 |
| | 1 | | | | |
| | 3 | | | | |
| 9 | 0 | 100.0 | 98.8 | 4 | 0 |
| | 1 | | | | |
| | 3 | | | | |
| 10 | 0 | 100.0 | 98.8 | 7 | 1 |
| | 1 | | | | |
| | 3 | | | | |
| 11 | 0 | 100.0 | 98.8 | 3 | 0 |
| | 1 | | | | |
| | 3 | | | | |
| 12 | 0 | 100.0 | 98.8 | 1 | 0 |
| | 1 | | | | |
| | 3 | | | | |
| 13 | 0 | 100.0 | 98.8 | 5 | 1 |
| | 1 | | | | |
| | 3 | | | | |
| 14 | 0 | 100.0 | 98.8 | 8 | 2 |
| | 1 | | | | |
| | 3 | | | | |

TABLE 37
Stability Data for Nivolumab SC Injection - Stored at 5° C.

| | Time | | | Nivolumab | SE-HPLC | | |
|---|---|---|---|---|---|---|---|
| | (Months | | Solution | Concentration | HMWS | Monomer | LMWS |
| Formulation | at 5° C.) | Appearance | pH | (mg/mL) | (Area %) | (Area %) | (Area %) |
| 1 | 0 | Complies(a) | 6.46 | 127 | 0.72 | 99.17 | 0.10 |
| | 6 | Complies | | | | | |
| | 12 | Complies | | | | | |
| 2 | 0 | Complies | 6.41 | 102 | 0.66 | 99.22 | 0.12 |
| | 6 | Complies | | | | | |
| | 12 | Complies | | | | | |
| 3 | 0 | Complies | 5.99 | 102 | 0.62 | 99.27 | 0.11 |
| | 6 | Complies | | | | | |
| | 12 | Complies | | | | | |
| 4 | 0 | Complies | 5.97 | 117 | 0.62 | 99.28 | 0.09 |
| | 6 | Complies | | | | | |
| | 12 | Complies | | | | | |
| 5 | 0 | Complies | 5.49 | 133 | 0.59 | 99.32 | 0.09 |
| | 6 | Complies | | | | | |
| | 12 | Complies | | | | | |
| 6 | 0 | Complies | 5.96 | 118 | 0.62 | 99.28 | 0.10 |
| | 6 | Complies | | | | | |
| | 12 | Complies | | | | | |
| 7 | 0 | Complies | 6.46 | 132 | 0.73 | 99.15 | 0.12 |
| | 6 | Complies | | | | | |
| | 12 | Complies | | | | | |
| 8 | 0 | Complies | 5.49 | 129 | 0.58 | 99.32 | 0.10 |
| | 6 | Complies | | | | | |
| | 12 | Complies | | | | | |
| 9 | 0 | Complies | 5.57 | 103 | 0.57 | 99.34 | 0.10 |
| | 6 | Complies | | | | | |
| | 12 | Complies | | | | | |
| 10 | 0 | Complies | 5.56 | 103 | 0.57 | 99.35 | 0.08 |
| | 6 | Complies | | | | | |
| | 12 | Complies | | | | | |
| 11 | 0 | Complies | 5.55 | 102 | 0.57 | 99.32 | 0.11 |
| | 6 | Complies | | | | | |
| | 12 | Complies | | | | | |
| 12 | 0 | Complies | 6.42 | 102 | 0.70 | 99.20 | 0.10 |
| | 6 | Complies | | | | | |
| | 12 | Complies | | | | | |
| 13 | 0 | Complies | 6.00 | 130 | 0.66 | 99.25 | 0.09 |
| | 6 | Complies | | | | | |
| | 12 | Complies | | | | | |
| 14 | 0 | Complies | 5.98 | 116 | 0.65 | 99.24 | 0.12 |
| | 6 | Complies | | | | | |
| | 12 | Complies | | | | | |

(a)Complies = Clear to slightly opalescent, colorless to pale-yellow solution

TABLE 38
Stability Data for Nivolumab SC Injection - Stored at 5° C.

| | | iCIEF | | | |
|---|---|---|---|---|---|
| | Time | Acidic | Main | Basic | Enzyme |
| Formu- | (Months | Group | Peak | Group | Activity |
| lation | at 5° C.) | (Area %) | (Area %) | (Area %) | (Units/mL) |
| 1 | 0 | 35.6 | 59.8 | 4.7 | 1,956 |
| | 6 | | | | |
| | 12 | | | | |
| 2 | 0 | 35.6 | 59.8 | 4.7 | 1,956 |
| | 6 | | | | |
| | 12 | | | | |
| 3 | 0 | 35.6 | 59.8 | 4.7 | 1,956 |
| | 6 | | | | |
| | 12 | | | | |
| 4 | 0 | 35.6 | 59.8 | 4.7 | 1,956 |
| | 6 | | | | |
| | 12 | | | | |
| 5 | 0 | 35.6 | 59.8 | 4.7 | 1,956 |
| | 6 | | | | |
| | 12 | | | | |
| 6 | 0 | 35.6 | 59.8 | 4.7 | 1,956 |
| | 6 | | | | |
| | 12 | | | | |
| 7 | 0 | 35.6 | 59.8 | 4.7 | 1,956 |
| | 6 | | | | |
| | 12 | | | | |
| 8 | 0 | 35.6 | 59.8 | 4.7 | 1,956 |
| | 6 | | | | |
| | 12 | | | | |
| 9 | 0 | 35.6 | 59.8 | 4.7 | 1,956 |
| | 6 | | | | |
| | 12 | | | | |
| 10 | 0 | 35.6 | 59.8 | 4.7 | 1,956 |
| | 6 | | | | |
| | 12 | | | | |
| 11 | 0 | 35.6 | 59.8 | 4.7 | 1,956 |
| | 6 | | | | |
| | 12 | | | | |
| 12 | 0 | 35.6 | 59.8 | 4.7 | 1,956 |
| | 6 | | | | |
| | 12 | | | | |
| 13 | 0 | 35.6 | 59.8 | 4.7 | 1,956 |
| | 6 | | | | |
| | 12 | | | | |
| 14 | 0 | 35.6 | 59.8 | 4.7 | 1,956 |
| | 6 | | | | |
| | 12 | | | | |

TABLE 39
Stability Data for Nivolumab SC Injection - Stored at 5° C.

| | | CE-SDS | CE-SDS | Particluate Matter | |
|---|---|---|---|---|---|
| | Time | (R) | (NR) | Particles/ | Particles/ |
| Formu- | (Months | Purity | Purity | mL ≥10 | mL ≥25 |
| lation | at 5° C.) | (Area %) | (Area %) | microns | microns |
| 1 | 0 | 100.0 | 98.8 | 1 | 0 |
| | 6 | | | | |
| | 12 | | | | |
| 2 | 0 | 100.0 | 98.8 | 5 | 1 |
| | 6 | | | | |
| | 12 | | | | |
| 3 | 0 | 100.0 | 98.8 | 3 | 1 |
| | 6 | | | | |
| | 12 | | | | |
| 4 | 0 | 100.0 | 98.8 | 6 | 3 |
| | 6 | | | | |
| | 12 | | | | |
| 5 | 0 | 100.0 | 98.8 | 0 | 0 |
| | 6 | | | | |
| | 12 | | | | |
| 6 | 0 | 100.0 | 98.8 | 1 | 0 |
| | 6 | | | | |
| | 12 | | | | |
| 7 | 0 | 100.0 | 98.8 | 1 | 1 |
| | 6 | | | | |
| | 12 | | | | |
| 8 | 0 | 100.0 | 98.8 | 1 | 0 |
| | 6 | | | | |
| | 12 | | | | |
| 9 | 0 | 100.0 | 98.8 | 4 | 0 |
| | 6 | | | | |
| | 12 | | | | |
| 10 | 0 | 100.0 | 98.8 | 7 | 1 |
| | 6 | | | | |
| | 12 | | | | |
| 11 | 0 | 100.0 | 98.8 | 3 | 0 |
| | 6 | | | | |
| | 12 | | | | |
| 12 | 0 | 100.0 | 98.8 | 1 | 0 |
| | 6 | | | | |
| | 12 | | | | |
| 13 | 0 | 100.0 | 98.8 | 5 | 1 |
| | 6 | | | | |
| | 12 | | | | |
| 14 | 0 | 100.0 | 98.8 | 8 | 2 |
| | 6 | | | | |
| | 12 | | | | |

[0543] Determination of Vial Target Fill Volume and Overfill

[0544] The labeled SC dose of nivolumab is 480 mg, which is a 4 mL injection of a drug product with a nivolumab concentration of 120 mg/mL. An overfill of nivolumab SC injection is included in each vial to account for losses in the vial, needle and syringe (VNS) during use of the product (consistent with USP <1151> minimum recommended excess volume fill) and to account for the variability in the filling machine. The overfill ensures that the label claim of nivolumab SC injection can be withdrawn from the vial.

[0545] A study was performed to determine the actual nivolumab SC injection holdup volume in the vial, needle and syringe. Vials were filled with exactly 4.50 mL of drug product, stoppered and sealed. Five participants used a 20G 1.5″ needle to withdraw the vial contents using a 5-cc plastic syringe. The 20G 1.5″ needle was replaced with a 25G ⅝″ needle, and the syringe contents were expelled into a small beaker. The weight of expelled drug product was converted to volume and subtracted from the vial fill volume of 4.50 mL. The holdup volume across the 5 participants ranged from 0.29 mL to 0.35 mL, with an average of 0.32 mL. It was noted that this value is similar to the USP <1151> recommended excess of 0.34 mL (extrapolated value) for a 6-cc vial size.

[0546] Closed system transfer devices (CSTDs) are used at many facilities to protect the health care providers from exposure to drugs. The CSTD for direct SC injection generally is composed of 3 parts and includes a vial adapter, syringe adapter and a needle adapter. To determine the holdup volume in the CSTD, the same 5 participants repeated the study using 6 of the most commonly available CSTDs. Once the CSTD is attached to vial, it cannot be easily removed, thus this part of the study will determine the holdup volume in the vial plus the holdup volume in the CSTD and syringe.

[0547] As with the previous arm of the study, 6R vials were filled with exactly 4.50 mL of nivolumab injection, then stoppered and sealed. The five participants used a CSTD vial adapter and a CSTD syringe adapter to withdraw the vial contents into a 5-cc plastic syringe. The syringe was separated from the vial, the CSTD needle adapter and 25G ⅝″ needle were added, and the syringe contents were expelled into a small beaker. The weight of expelled drug product was converted to volume and subtracted from the vial fill volume of 4.50 mL. The holdup volume across the 5 participants is presented in Table 40. Across the 30 results generated, the average vial plus CSTD holdup volume was 0.46 mL with a standard deviation of 0.06 mL. However, the highest holdup volume for each of the 6 different CSTDs ranged from 0.46 mL to 0.58 mL. The selected holdup volume is then 0.58 mL+0.06 mL=0.64 mL. With 3% filling machine variability the selected target fill is (4.00 mL+0.64 mL)/0.97=4.78 mL.

TABLE 40
Vial Plus CSTD Holdup Volumes for Nivolumab SC Injection

| | Holdup | Holdup | Holdup | Holdup | Holdup | Average | Highest |
|---|---|---|---|---|---|---|---|
| | Volume | Volume | Volume | Volume | Volume | Holdup | Holdup |
| CSTD | 1 (mL) | 2 (mL) | 3 (mL) | 4 (mL) | 5 (mL) | Volume (mL) | Volume (mL) |
| PhaSeal | 0.41 | 0.50 | 0.51 | 0.51 | 0.43 | 0.47 | 0.51 |
| ChemoLock | 0.53 | 0.51 | 0.58 | 0.49 | 0.45 | 0.51 | 0.58 |
| ChemoClave | 0.44 | 0.40 | 0.45 | 0.51 | 0.41 | 0.44 | 0.51 |
| OnGuard | 0.42 | 0.46 | 0.34 | 0.52 | 0.43 | 0.43 | 0.52 |
| Equashield | 0.42 | 0.35 | 0.34 | 0.46 | 0.42 | 0.40 | 0.46 |
| CareFusion | 0.48 | 0.41 | 0.57 | 0.55 | 0.49 | 0.50 | 0.57 |

[0548] Description and Composition of a Commercial Formulation

[0549] A commercial formulation for Nivolumab SC Injection, 600 mg/Vial (120 mg/mL) is sterile, non-pyrogenic, clear to very opalescent, colorless to yellow liquid. A few particulates, consistent in appearance to proteinaceous particles, may be present. The drug product is a single-use, preservative-free, isotonic aqueous solution for subcutaneous (SC) administration. Nivolumab SC injection is packaged in 6R Type 1 flint glass vials, stoppered with 20-mm Daikyo D21-7S Flurotec® coated butyl stoppers that are secured with 20-mm aluminum seals with flip-off caps. The composition of nivolumab SC injection, which includes the quality standard and function of each component, is presented in Table 41. An overfill of nivolumab SC injection is included in each vial to ensure that the labeled quantity of 5.0 mL can be administered to the patient.

TABLE 41
Composition of Nivolumab SC Injection, 600
mg/vial (120 mg/mL) Commercial Formulation

| | | | Amount per |
|---|---|---|---|
| Component | Quality Standard | Function | Vial (mg)^{a} |
| Nivolumab | BMS Specification | Active ingredient | 780 |
| L-Histidine ^{b} | USP, Ph. Eur. | Buffering agent | 10.1 |
| L-Histidine | Ph. Eur. | Buffering agent | 13.7 |
| HCl H₂O | | | |
| Sucrose | NF, Ph. Eur. | Tonicity modifier | 556 |
| Polysorbate 80 | NF, Ph. Eur. | Surfactant | 3.25 |
| Pentetic Acid | USP | Metal ion chelator | 0.128 |
| Methionine | USP, Ph. Eur. | Antioxidant | 4.85 |
| rHuPH20 | BMS/Halozyme | Endoglycosidase | 0.118 |
| Sodium | NA | NA | NA |
| Chloride ^{b} | | | |
| Water for | USP, Ph. Eur. | Solvent | q.s. to 6.50 mL |
| Injection | | | |

^{a}Target fill includes a 1.5 mL overfill to account for vial, needle, and syringe (VNS) holdup, filling machine variability and administration component holdup.
^{b} Sodium chloride and histidine are present in the rHuPH20 drug substance, but make insignificant contributions to the final composition.
USP = United States Pharmacopoeia,
Ph. Eur. = European Pharmacopoeia,
NF = National Formulary,
q.s. = quantity sufficient

[0550] Selected Physical and Chemical Properties

[0551] Selected physical and chemical properties of 150 mg/mL nivolumab drug substance, 120 mg/mL nivolumab drug product and dilution buffer are presented in Table 42.

TABLE 42
Selected Physical and Chemical Properties of 150 mg/mL Nivolumab Drug
Substance, 120 mg/mL Nivolumab Drug Product and Dilution Buffer

| Property | Drug Substance | | Drug Product | | Dilution Buffer | |
|---|---|---|---|---|---|---|
| Nivolumab | 150 mg/mL | | 120 mg/mL | | 0 | mg/mL |
| Concentration | (135-180 mg/mL) | | (108-132 mg/mL) | | | |
| Formulation | 20 mM histidine, 250 mM | | 20 mM histidine, 250 mM | | 20 mM histidine, 250 mM | |
| (Target | sucrose, 0.05% w/v PS80, | | sucrose, 0.05% w/v PS80, | | sucrose, 0.05% w/v PS80, | |
| Values) | 50 μM pentetic acid | | 50 μM pentetic acid, | | 50 μM pentetic acid, | |
| | | | 5 mM methionine, 2 kU/mL | | 25 mM methionine, 10 kU/mL | |
| | | | rHuPH20 | | rHuPH20^{a} | |
| Solution pH | 6.0 ± 0.5 | | 6.0 ± 0.5 | | 6.0 ± 0.5 | |
| (at 18-22° C.) | | | | | | |
| Density | 1.078 | g/mL | 1.069 | g/mL | 1.033 | g/mL |
| (at 15-25° C.) | | | | | | |
| Viscosity | 37 cP at 5° C. | | 13 cP at 5° C. | | 1.8 cP at 5° C. | |
| | 17 cP 20° C. | | 7 cP 20° C. | | 1.6 cP 20° C. | |
| Surface | 46 | mN/m | 45 | mN/m | 42 | mN/m |
| Tension | | | | | | |
| (at 22° C.) | | | | | | |

| | | | |
|---|---|---|---|
| Osmolality | TBD | 350 ± 20% | 330 ± 20% |
| (mOsm/kg) | | | |
| Appearance | Colorless to yellow, clear | Colorless to yellow, clear to | No appearance description |
| | to very opalescent liquid | very opal, liquid, light (few) | since an in-process |
| | | particulates (consistent in | intermediate |
| | | appear. to protein part.) may be | |
| | | present | |
| Recommended | ≤−35° C., protected from | 2-8° C., protected from | 2-8° C., protected from |
| Storage & | light | light and freezing | light and freezing |
| Shipping | | | |
| Conditions | | | |

^{a}Exact quantities of methionine and rHuPH20 in the dilution buffer will depend on the nivolumab concentration of the drug substance used to manufacture the batch. ref: ELN A0C6F-067, -079, -083, -085 -086.

[0552] Stress Studies

[0553] Short-Term Room Temperature and Room Light Study

[0554] The objective of this study was to evaluate the impact of short-term room temperature/room light (RT/RL) exposure on nivolumab SC injection. The data generated in this short term study helps inform about the length of exposure to be used in longer-term stress studies. The drug product formulation used in this study was 120 mg/mL nivolumab in 20 mM histidine buffer pH 6.0, with 250 mM sucrose, 0.05% w/v polysorbate 80, 50 μM pentetic acid, 5 mM methionine and 2,000 U/mL rHuPH20. The bulk solution (5.67 mL aliquots) was filled into 10-cc glass vials that were stoppered and sealed. The vials were then separately subjected to the following stresses. The vials were placed in the horizontal position for worst case light exposure: 25C/RL exposed—testing after 7 days, 14 days and 28 days at RT/RL; 25C/RL protected*—testing after 7 days, 14 days and 28 days at RT (*protected by wrapping vials in aluminum foil).

[0555] The light source was a halophosphate bulb encased in a plastic tube. The unlabeled vials were placed on white paper, in the horizontal position, on a plastic tray. UV meter readings at all four corners were 0 μW/cm² at every timepoint. Light meter readings at the four corners were taken at every timepoint and ranged from 933 lux to 1023 lux. After being pulled from exposure to the stress condition, the samples were stored at 5° C. All samples were tested together at the end of the study. Testing included appearance, pH, protein concentration, SE-HPLC, subvisible particulate levels by HIAC, CE-SDS (R&NR), iCIEF and enzyme activity.

[0556] Stability data from the study are presented in Tables 43 through 45. As presented in Table 43, the visual appearance for all samples at all timepoints was a clear to slightly opalescent, colorless to pale-yellow solution. There were no changes observed in pH or protein concentration for any of the samples over the 28 day study. The level of HMWS increased by 0.12% for samples stored at the accelerated 25° C. light protected condition, and by 1.00% for samples stored at 25° C. and 1,000 lux light. The level of LMWS was little changed for all samples through the 28 day timepoint.

TABLE 43
Stability Data for Nivolumab SC Injection

| | | | | Nivolumab | SE-HPLC | | |
|---|---|---|---|---|---|---|---|
| Storage | Time | | Solution | Concentration | HMWS | Monomer | LMWS |
| Cond. | (Days) | Appearance | pH | (mg/mL) | (Area %) | (Area %) | (Area %) |
| 25° C./ | 0 | Complies | 5.98 | 118 | 0.85 | 99.07 | 0.08 |
| dark | 7 | Complies | 5.99 | 117 | 0.89 | 99.03 | 0.08 |
| | 14 | Complies | 5.97 | 119 | 0.92 | 99.00 | 0.08 |
| | 28 | Complies | 6.00 | 121 | 0.97 | 98.94 | 0.09 |
| 25° C./ | 0 | Complies | 5.98 | 118 | 0.85 | 99.07 | 0.08 |
| 1,000 lux | 7 | Complies | 5.98 | 119 | 1.15 | 98.77 | 0.08 |
| | 14 | Complies | 6.01 | 118 | 1.35 | 98.57 | 0.08 |
| | 28 | Complies | 5.96 | 118 | 1.85 | 98.05 | 0.09 |

^{a} Complies = Clear to slightly opalescent, colorless to pale-yellow solution.

[0557] Table 44 presents stability data for charge variants by iCIEF and enzyme activity. Over the 28 day storage period, the level of acidic species increased by 1.0% for samples stored in the dark at 25° C. and by 5.6% for samples stored at 25° C./1,000 lux. The level of basic species was little changed for both storage conditions. The increase observed in the level acidic species was accompanied by an approximately equal decrease in the main peak area. Enzyme activity was little changed for samples stored at 25° C. in the dark, but decreased by about 2% per day for samples stored at 25° C./1,000 lux.

TABLE 44
Stability Data for Nivolumab SC Injection

| | | iCIEF | | | |
|---|---|---|---|---|---|
| | | Acidic | Main | Basic | Enzyme |
| Storage | Time | Group | Peak | Group | Activity |
| Cond. | (Days) | (Area %) | (Area %) | (Area %) | (Units/mL) |
| 25° C./ | 0 | 34.6 | 60.2 | 5.3 | 2,022 |
| dark | 7 | 34.3 | 60.2 | 5.5 | 1,996 |
| | 14 | 34.8 | 59.3 | 5.9 | 2,022 |
| | 28 | 35.6 | 58.5 | 5.9 | 2,000 |
| 25° C./ | 0 | 34.6 | 60.2 | 5.3 | 2,022 |
| 1,000 lux | 7 | 36.5 | 58.0 | 5.5 | 1,696 |
| | 14 | 37.1 | 57.2 | 5.7 | 1,362 |
| | 28 | 40.2 | 54.2 | 5.6 | 994 |

[0558] Table 45 presents data for CE-SDS reduced, CE-SDS non-reduced and subvisible particulate matter. Whether stored in the light or in the dark, percent purity by reduced CE-SDS was unchanged over the 28 day study period. The percent purity by non-reduced CE-SDS decreased by 0.4% over the 28 day storage period, both for samples exposed and protected from the room light. Subvisible particulate levels were low with no apparent trends.

TABLE 45
Stability Data for Nivolumab SC Injection

| | | CE-SDS | CE-SDS | Particluate Matter | |
|---|---|---|---|---|---|
| | | (R) | (NR) | Particles/ | Particles/ |
| Storage | Time | Purity | Purity | mL ≥10 | mL ≥25 |
| Cond. | (Days) | (Area %) | (Area %) | microns | microns |
| 25° C./ | 0 | 100.0 | 99.5 | 5 | 2 |
| dark | 7 | 100.0 | 99.4 | 8 | 0 |
| | 14 | 100.0 | 99.2 | 5 | 0 |
| | 28 | 100.0 | 99.1 | 2 | 0 |
| 25° C./ | 0 | 100.0 | 99.5 | 5 | 2 |
| 1,000 lux | 7 | 100.0 | 99.3 | 8 | 0 |
| | 14 | 100.0 | 99.2 | 8 | 0 |
| | 28 | 100.0 | 99.1 | 8 | 0 |

[0559] Based on the results of this study, drug product exposure to room light is recommended to be limited.

[0560] Short-Term Stability of rHuPH20 in Nivolumab SC Injection Stored at 25-40° C.

[0561] A study was performed to evaluate the impact of storage temperature on rHuPH20 enzyme activity when nivolumab SC injection was stored for up to 24 hours at temperatures ranging from 25° C. to 40° C. Separate vials of drug product were stored at 25° C., 32° C., 36° C. and 40° C. in the dark for up to 24 hours. After the storage period the samples were tested for rHuPH20 activity. Each sample was tested in triplicate. A sample that had been stored continuously at 5° C. was also tested as a control. Results are presented in Table 46.

TABLE 46
Effect of Storage Temperature on Enzyme Activity When Nivolumab SC Injection
is Stored at Various Temperatures for 24 Hours in the Dark

| | | | | Average | Enzyme Activity |
|---|---|---|---|---|---|
| Storage | Analysis #1 | Analysis #2 | Analysis #3 | Enzyme Activity | as a % of 5° C. |
| Temperature | (units/mL) | (units/mL) | (units/mL) | (units/mL) | Stored Control |
| 5° C. (Control) | 2039 | 1982 | 1826 | 1949 | 100.0 |
| 25° C. | 2043 | 1937 | 1891 | 1957 | 100.4 |
| 32° C. | 2005 | 1797 | 1809 | 1870 | 95.9 |
| 36° C. | 2006 | 1916 | 1774 | 1899 | 97.4 |
| 40° C. | 1337 | 1565 | 1546 | 1483 | 76.1 |

[0562] Although the enzyme activity results show a considerable amount of variability, a trend of decreasing stability with increasing temperature is observed. Thus, drug product storage time above 25° C. must be limited.

[0563] Physical Stress Study

[0564] A study was performed to examine the impact of physical stresses on the stability of nivolumab SC injection. The physical stresses placed on the drug product were similar to those that might typically be experienced during manufacture, shipping or use. The stresses included freeze-thaw (Group 1), room temperature exposure, room light exposure, high temperature excursion (Group 2), shock and shaking (Group 3) and continuous storage at 5° C., protected from light (Group 4—control). A batch of nivolumab SC injection was prepared and 3.0 mL aliquots of the drug product were filled into 6-cc vials that were then stoppered and sealed. The filled vials were subjected to the various stresses, then placed on accelerated stability at 25° C.

[0565] For the freeze-thaw arm of the study (Group 1), the filled vials were cycled four times between −20° C. and 5° C., with a minimum freeze time at −20° C. of 16 hours and a minimum thaw time at 5° C. of 8 hours. It was observed that the solution in the vials completely froze after 2 to 3 hours of storage at −20° C. and completely thawed after 6 to 7 hours of storage at 5° C. For the room temperature, room light and high temperature excursion arm of the study (Group 2), the vials were stored for 22 days at 25° C., protected from light. The Group 2 vials also experienced two excursions from this 25° C./dark storage condition: 72 hours (3 days) at 25° C. in 1,000 lux light and 72 hours (3 days) at 30° C., protected from light. For the shock and shaking stress (Group 3), the vials were dropped five times from a height of 36 inches and then placed in the worst case horizontal position on an orbital shaker at 120 rpm for 24 hours. The dropping of vials and orbital shaking was performed at both 5° C. and ambient room temperature (approximately 22° C.). Samples of drug product Group 4, the control arm, remained in 5° C. storage, protected from light.

[0566] Samples from each group were tested at the initial timepoint for solution appearance, pH, protein concentration, size homogeneity by SE-HPLC and subvisible particulate matter by HIAC. In addition, charge variants were determined by iCIEF, molecular weight distribution by CE-SDS (R&NR) and enzyme activity using a plate based turbidimetric method. Samples were again tested after 3 months and 6 months of storage at the accelerated condition of 25° C. The stability results are presented in Table 47 to Table 49.

TABLE 47
Physical Stress Stability Study Data

| | Time | | | Nivolumab | SE-HPLC | | |
|---|---|---|---|---|---|---|---|
| Stress | (Months | | Solution | Concentration | HMWS | Monomer | LMWS |
| Condition | at 25° C.) | Appearance | pH | (mg/mL) | (Area %) | (Area %) | (Area %) |
| Group 1 | 0 | Complies(a) | 5.96 | 121 | 0.86 | 99.07 | 0.07 |
| (4 X F/T, −20° C. | 3 | Complies | 6.01 | 119 | 1.00 | 98.88 | 0.12 |
| to +5° C.) | 6 | Complies | 5.97 | 123 | 1.29 | 98.58 | 0.13 |
| Group 2 | 0 | Complies | 5.93 | 119 | 1.06 | 98.86 | 0.08 |
| (25° C., 30° C., | 3 | Complies | 5.99 | 120 | 1.15 | 98.71 | 0.13 |
| RT/RL) | 6 | Complies | 5.92 | 121 | 1.45 | 98.42 | 0.13 |
| Group 3 | 0 | Complies | 5.94 | 119 | 0.87 | 99.06 | 0.08 |
| (Shock and | 3 | Complies | 5.98 | 118 | 1.00 | 98.90 | 0.10 |
| Shaking) | 6 | Complies | 5.93 | 121 | 1.30 | 98.56 | 0.13 |
| Group 4 | 0 | Complies | 5.95 | 121 | 0.85 | 99.06 | 0.08 |
| (5° C./Dark | 3 | Complies | 6.02 | 122 | 0.97 | 98.94 | 0.09 |
| Stored Control) | 6 | Complies | 5.94 | 120 | 1.30 | 98.58 | 0.13 |

(a)Complies = Clear to slightly opalescent, colorless to pale-yellow solution.

TABLE 48
Physical Stress Stability Study Data

| | | iCIEF | | | |
|---|---|---|---|---|---|
| | Time | Acidic | Main | Basic | Enzyme |
| Stress | (Months | Group | Peak | Group | Activity |
| Condition | at 25° C.) | (Area %) | (Area %) | (Area %) | (Units/mL) |
| Group 1 | 0 | 35.6 | 59.8 | 4.7 | 1,956 |
| 4 X F/T, | 3 | 40.1 | 54.0 | 5.9 | 1,936 |
| (−20° C. | 6 | 40.5 | 53.6 | 5.9 | 2,025 |
| to +5° C.) | | | | | |
| Group 2 | 0 | 37.0 | 57.8 | 5.3 | 1,855 |
| 25° C., | 3 | 40.9 | 53.2 | 5.9 | 1,816 |
| 30° C., | 6 | 44.0 | 49.9 | 6.0 | 1,901 |
| RT/RL | | | | | |
| Group 3 | 0 | 35.6 | 59.8 | 4.6 | 1,940 |
| Shock and | 3 | 39.4 | 55.0 | 5.6 | 1,936 |
| Shaking | 6 | 41.3 | 52.8 | 5.9 | 1,959 |
| Group 4 | 0 | 35.6 | 59.8 | 4.6 | 1,903 |
| 5° C./dark | 3 | 39.0 | 55.1 | 5.9 | 1,952 |
| stored | 6 | 41.3 | 52.8 | 6.0 | 1,917 |
| control | | | | | |

TABLE 49
Physical Stress Stability Study Data

| | | | | Subvisible | |
|---|---|---|---|---|---|
| | | CE-SDS | CE-SDS | Particluate Matter | |
| | Time | (R) | (NR) | Particles/ | Particles/ |
| Stress | (Months | Purity | Purity | mL ≥10 | mL ≥25 |
| Condition | at 25° C.) | (Area %) | (Area %) | microns | microns |
| Group 1 | 0 | 100.0 | 98.8 | 8 | 0 |
| 4 X F/T, | 3 | 99.9 | 99.4 | 8 | 3 |
| (−20° C. | 6 | 99.7 | 97.2 | 10 | 1 |
| to +5° C.) | | | | | |
| Group 2 | 0 | 100.0 | 98.5 | 8 | 0 |
| 25° C., | 3 | 99.9 | 99.2 | 5 | 1 |
| 30° C., | 6 | 99.7 | 96.5 | 6 | 0 |
| RT/RL | | | | | |
| Group 3 | 0 | 100.0 | 98.8 | 3 | 1 |
| Shock and | 3 | 99.9 | 99.3 | 7 | 0 |
| Shaking | 6 | 99.8 | 96.8 | 4 | 0 |
| Group 4 | 0 | 100.0 | 98.6 | 17 | 3 |
| 5° C./dark | 3 | 99.9 | 99.3 | 6 | 0 |
| stored | 6 | 99.8 | 96.8 | 14 | 2 |
| control | | | | | |

[0567] At the initial timepoint, across all four groups, there were no changes observed in solution appearance, pH or nivolumab concentration. Similar initial results were observed for size homogeneity by SE-HPLC, charge variants by iCIEF, size variants by CE-SDS (R&NR) and enzyme activity for Groups 1, 3 and 4. The level of HMWS for Group 2 samples (room temperature, room light and 30° C. storage) was 0.21% higher than the control and the level of acidic species for Group 2 samples was 1.4% higher than the control. Subvisible particulate matter by HIAC was very low for all samples. Enzyme activity for the Group 2 sample was 2.5% lower than that of the control at the initial timepoint.

[0568] After six months of storage at the accelerated condition of 25° C., across all four groups, there were no changes in solution appearance, pH or nivolumab concentration. The level of HMWS for Groups 1, 3 and 4 was similar and the level of HWWS for Group 2 was 0.15% higher than that of the control. The level of LMWS was identical at 0.13% for all four groups. For charge variants by iCIEF, the level of acidic species for Group 2 was 2.7% higher than that of the control and was similar to the control for Groups 1 and 3. Basic species across all four groups ranged from 5.9% to 6.0% at the six month timepoint. The level of molecular size variants across all four groups was in the range of 99.7% to 99.8% for reduced CE-SDS and in the range of 96.5% to 97.2% for non-reduced CE-SDS. At the six month timepoint, subvisible particulate matter count by HIAC was very low for all samples, with no apparent trends and enzyme activity for all groups was determined to be within 99.2% and 105.6% of the control.

[0569] Time Out Refrigeration and Time at Room Light

[0570] The recommended storage condition for nivolumab SC injection is 2-8° C., protected from light. Based on the data collected from the short-term room temperature/room light study, the short-term stability of rHuPH20 at 25-40° C. and the physical stress study, a time out of refrigeration and time at room light can be established for the drug product. The short-term RT/RL study showed the sensitivity to room light, the rHuPH20 study showed the sensitivity of the enzyme to higher temperatures and the physical stress study data showed minimal impact on quality attributes from stresses than might occur during drug product manufacture, shipping or use. Based on the results of these studies, a time out of refrigeration/time at room light (TOR/TARL) for the finished drug product can be recommended. This TOR/TARL covers the time period that begins with the application of the seal to the vial and ends with the start of preparation for administration to the patient and includes post-filling activities (vial handling, inspection, sampling, labeling, secondary packaging and shipping preparation) and temperature excursions during transport up to the start of preparation of the dose for patient administration.

[0571] The recommended storage condition for nivolumab SC injection is 2-8° C., protected from light. Excursions from the recommended storage condition for up to 28 days at up to 25° C. are permitted, including storage in room temperature and room light for up to 72 hours and storage at 30° C. for up to 72 hours.

[0572] Freezing Temperature for Drug Product in a Vial

[0573] As part of the physical stress evaluation, a study was conducted to determine the temperature at which nivolumab SC injection freezes when filled in a 6-cc glass vial and stored at sub-zero temperatures for relatively short periods of time. Six vials of nivolumab SC injection, 3 mL/vial, were placed in a temperature controlled water bath. The bath temperature was lowered to −8° C. (temperature confirmed with a calibrated thermocouple) and held for 9 hours. At the 9 hour timepoint, the vials were inspected to determine if the solution in the vials had frozen. The bath temperature was then lowered to −10° C. and held for another 15 hours. After 15 hours at −10° C., the vials were again inspected to determine if the solution in the vials had frozen. The bath temperature was then lowered to −12° C. and held for 9 hours. All 6 vials had frozen after 9 hours of storage at −12° C.

[0574] The results of the study are presented in the table below. After 9 hours at −8° C. followed by 15 hours at −10° C., all samples were still in the solution state. After 9 hours at −12° C., all six vials had frozen. Thus, the freezing temperature of nivolumab SC injection when filled in a glass vial is between −12° C. and −10° C. and the solution in the vials will not freeze when stored for up to 15 hours at temperatures as low as −10° C.

TABLE 50
Freezing Temperature Study Results

| | Frozen (+) or Not-Frozen | | | | | |
|---|---|---|---|---|---|---|
| | (−) at End of Hold Step | | | | | |
| Bath Temperature | Vial | Vial | Vial | Vial | Vial | Vial |
| and Hold Period | 1 | 2 | 3 | 4 | 5 | 6 |
| −8.0° C. for 9 Hours | − | − | − | − | − | − |
| −10.0° C. for 15 Hours | − | − | − | − | − | − |
| −12.0° C. for 9 Hours | + | + | + | + | + | + |

[0575] General Product Information

[0576] Some general information about the drug substance and drug product is provided as follows. Nivolumab drug substance is stored at ≤−35° C. in 12-L FFTp bags with protection from light. The storage condition for the drug product is 2-8° C., with protection from light. The compositions of the drug substance and drug product are listed in Table 51, the selected properties of drug substance, drug product and dilution buffer are presented in Table 52.

TABLE 51

| | | | Drug Product | |
|---|---|---|---|---|
| Description | Drug Substance | | 60 mg/vial & 600 mg/vial | |
| Nivolumab | Target 150 mg/mL | | 120 | mg/mL |
| (BMS-986298) | (135-180 mg/mL) | | | |
| Histidine/Histidine | 20 | mM^{b} | 20 | mM^{b} |
| HCl Monohydrate | | | | |
| Sucrose | 250 | mM | 250 | mM |
| Polysorbate 80 | 0.05% | w/v | 0.05% | w/v |
| Pentetic Acid | 50 | μM | 50 | μM |

| | | | |
|---|---|---|---|
| Methionine | N/A^{a} | 5 | mM |
| rHuPH20 | N/A^{a} | 2,000 | U/mL |

| | | |
|---|---|---|
| Sodium Chloride | N/A^{b} | N/A^{b} |
| Target pH | 6.0 | 6.0 |

^{a}Methionine and rHuPH20 are added to the dilution buffer, which is then added to the drug substance to create the drug product.
^{b}Sodium chloride and histidine are present in the rHuPH20 drug substance, but make insignificant contributions to the final composition

TABLE 52
Selected Properties of Drug Substance,
Drug Product and Dilution Buffer

| Property | Drug Substance | | Drug Product | | Dilution Buffer | |
|---|---|---|---|---|---|---|
| Nivolumab | 150 mg/mL | | 120 mg/mL | | 0 | mg/mL |
| Concentration | (135-180 mg/mL) | | (108-132 mg/mL) | | | |
| Solution pH | 6.0 ± 0.5 | | 6.0 ± 0.5 | | 6.0 ± 0.5 | |
| (at 18-22° C.) | | | | | | |
| Density | 1.078 | g/mL | 1.069 | g/mL | 1.033 | g/mL |
| (at 15-25° C.) | | | | | | |
| Viscosity | 37 cP at 5° C., | | 13 cP at 5° C., | | 1.8 cP at 5° C., | |
| | 17 cP 20° C. | | 7 cP 20° C. | | 1.6 cP 20° C. | |
| Surface | 46 | mN/m | 45 | mN/m | 42 | mN/m |
| Tension | | | | | | |
| (at 22° C.) | | | | | | |

### Example 2—Subcutaneous Nivolumab with or without rHuPH20

[0577] In an ongoing Phase 1/2 study the PK, safety, efficacy, and tolerability was evaluated for nivolumab monotherapy administered subcutaneously (SC) with or without the hyaluronidase rHuPH20 in patients across solid tumors (metastatic melanoma, RCC, NSCLC, HCC, and CRC) where PK, efficacy, safety, and immunogenicity of nivolumab following IV administration have been well-characterized. Other solid tumors where PK of IV nivolumab was well-characterized (gastroesophageal junction [GEJ], gastric cancer (GC), metastatic urothelial carcinoma (mUC) and SCCHN were permitted).

[0578] The starting SC dose selected for Part A was 720 mg Q4W. Based on preliminary PK from Part A and subsequent modeling, this study proceeded as planned with a second dose of 960 mg Q4W for Part B.

[0579] For Parts A and B, PK of single dose SC nivolumab (with and without rHuPH20) was characterized, followed by IV nivolumab 480 mg Q4W at Week 4. These SC PK data were used to update existing IV PPK model. The combined SC/V PPK model was then used to select SC nivolumab dosing regimen of 1200 mg Q4W for use in subsequent studies.

[0580] Parts C and D will provide additional PK and safety data following SC administration of 1200 mg Q4W in Part C (approximately 45 patients) and Part D (approximately 36 patients). Part C was designed to characterize the PK and study safety of continuous dosing of SC nivolumab 1200 mg Q4W in the context of switching from IV (transition from Parts A and B). Part D includes PK and safety of continuous dosing of SC nivolumab 1200 mg Q4W from initiation of therapy. An interim analysis will be performed including evaluation of pre-dose Cycle 2 Day 1 PK and early safety in approximately 10 subjects with the 1200 mg dose.

[0581] The primary objective of Parts A-D is to describe the PK of SC nivolumab with or without rHuPH20 as assessed by multiple measures including Cavgd28, Cmind28, and Cmax1.

[0582] Parts A-D study primary objectives are to describe the pharmacokinetics of nivolumab administered subcutaneously, with or without rHuPH20, and the endpoints are Cmax, Tmax, AUC(TAU), and Ctau (Parts A, B, and D), and Ctau (Part C). Secondary objectives include (i) to assess the safety profile of SC nivolumab; (ii) to evaluate incidence of AEs in the broad standardized MedDRA query (SMQ) of Anaphylactic Reaction and the select AE hypersensitivity/infusion reaction category; and (iii) to assess the immunogenicity of nivolumab. Secondary endpoints include (i) incidences of AEs, SAEs, AEs leading to discontinuation, deaths, and laboratory abnormalities; (ii) incidence of AEs in the broad SMQ of Anaphylactic Reaction occurring within 2 days after study drug administration; (iii) incidence of events within the hypersensitivity/infusion reaction select AE category occurring within 2 days after study drug administration; and (iv) incidence of anti-nivolumab antibodies and neutralizing antibodies, if applicable. Exploratory objectives include (i) to evaluate preliminary efficacy in all participants; (ii) to characterize biomarker measures of immune function and tumor genetics and genomics; (iii) to assess the immunogenicity of rHuPH20; and (iv) to assess the preliminary participant experience and preference for SC or IV administration of nivolumab. Exploratory endpoints include (i) ORR, PFS, and OS; (ii) summary measures of change (or % change) from baseline in various biomarkers and molecular characteristics of the tumor; (iii) incidence of anti-rHuPH20 antibodies and neutralizing antibodies, if applicable; and (iv) patient experience/preference questionnaire and qualitative patient interviews.

[0583] Results

[0584] Thirty-two subjects have been treated with a single dose of nivolumab (either 720 mg or 960 mg) administered via SC injection co-administered with rHuPH20, followed by IV nivolumab. An interim analysis was conducted after all subjects in Part B (Group 3) completed 1 cycle of SC nivolumab. 22 subjects in Part A—Group 1 (720 mg+rHuPH20) and 10 subjects in Part B—Group 3 (960 mg+rHuPH20) were analyzed for PK and early safety data. No formal outputs for efficacy are available at the time of the lock due to the short follow-up.

[0585] As of the DBL (minimum pre-dose Cycle 2 Day 1 on all Part B Group 3), the median follow-up for Part A—Group 1 (N=22) was 4.4 months (range: 2.4-8.8 months) and in Part B—Group 3 (N=10) was 2.5 months (range: 2.1-3.5 months).

[0586] The baseline disease characteristics of the study participants are shown in Table 53. There were 14 males and 18 females. Median (range) age of all patients was 66.5 (48-90) years. The 32 subjects represent a diverse patient population, including subjects with a range of ages, weights, and tumors (NSCLC, CRC, RCC, HCC, melanoma, and SCCHN) in the advanced/metastatic setting.

TABLE 53A
Baseline Characteristics

| | Number of Subjects (%) | | | | | |
|---|---|---|---|---|---|---|
| | PART A - GRP 1 | | PART B - GRP 3 | | Total | |
| | N = 22 | | N = 10 | | N = 32 | |
| TUMOR TYPE | | | | | | |
| COLORECTAL CANCER | 6 | (27.3) | 3 | (30.0) | 9 | (28.1) |
| HEPATOCELLULAR CARCINOMA | 2 | (9.1) | 0 | | 2 | (6.3) |
| MELANOMA | 2 | (9.1) | 0 | | 2 | (6.3) |
| NON-SMALL CELL LUNG CARCINOMA | 7 | (31.8) | 3 | (30.0) | 10 | (31.3) |
| RENAL CELL CARCINOMA | 5 | (22.7) | 3 | (30.0) | 8 | (25.0) |
| NOT REPORTED* | 0 | | 1 | (10.0) | 1 | (3.1) |
| SUBJECTS WITH PD-L1 CERTIFIABLE AT BASELINE (N(%)) | 18 | (81.8) | 3 | (30.0) | 21 | (65.6) |
| SUBJECTS WITH BASELINE PD-L1 EXPRESSION >= 1% | 9 | (50.0) | 3 | (100.0) | 12 | (57.1) |
| SUBJECTS WITH BASELINE PD-L1 EXPRESSION < 1% | 9 | (50.0) | 0 | | 9 | (42.9) |
| SUBJECTS WITH BASELINE PD-L1 EXPRESSION >= 5% | 7 | (38.9) | 2 | (66.7) | 9 | (42.9) |
| SUBJECTS WITH BASELINE PD-L1 EXPRESSION < 5% | 11 | (61.1) | 1 | (33.3) | 12 | (57.1) |
| SUBJECTS WITH BASELINE PD-L1 EXPRESSION >= 50% | 3 | (16.7) | 0 | | 3 | (14.3) |
| SUBJECTS WITH BASELINE PD-L1 EXPRESSION < 50% | 15 | (83.3) | 3 | (100.0) | 18 | (85.7) |
| PRIOR LINES OF THERAPIES | | | | | | |
| 0 | 2 | (9.1) | 2 | (20.0) | 4 | (12.5) |
| 1 | 0 | | 0 | | 0 | |
| 2 | 13 | (59.1) | 4 | (40.0) | 17 | (53.1) |
| >=3 | 5 | (22.7) | 4 | (40.0) | 9 | (28.1) |
| NOT REPORTED | 2 | (9.1) | 0 | | 2 | (6.3) |
| PERFORMANCE STATUS (ECOG) [%] | | | | | | |
| 0 | 9 | (40.9) | 3 | (30.0) | 12 | (37.5) |
| 1 | 13 | (59.1) | 7 | (70.0) | 20 | (62.5) |

[0587] Preliminary Safety Data

[0588] Group 1 (720 mg+rHuPH20 SC dose followed by IV): Any-grade treatment-related AEs (TRAEs) were reported in 10 (45.5%) subjects and were generally known AEs within nivolumab IV program (Table 54B). Low-grade erythema, irritation, and swelling at the SC injection site were reported in 3 (14%) subjects.

[0589] Group 3 (960 mg+rHuPH20 SC dose followed by IV): Any grade TRAEs were reported in 3 (30%) subjects, which included Grade 1-2 immune-mediated skin rash, livedo reticularis, and local site reactions. Low grade erythema, pruritis and swelling at the SC injection site were reported in 2 (20%) subjects. At time of the DBL, there were no treatment-related SAEs (TRSAE) reported in Group 3.

[0590] Early safety analyses of subjects receiving SC nivolumab 720 mg+rHuPH20 (Group 1) and 960 mg SC+rHuPH20 (Group 3) are descriptive (and not intended for comparison across groups). The clinical safety profile of single dose SC nivolumab followed by IV (Cycle 2+) reflect treatment-related AEs and SAEs previously reported within the nivolumab IV IB, with the exception of SC local reactions. With respect to local AEs with SC injection, there were no unexpected local site reactions and all reported events were low grade and manageable. All 32 subjects in Group 1 and 3 had Cycle 1 Day 1 SC nivolumab (720 mg or 960 mg)+rHuPH20 doses administered in a single manual injection of either 6 mL or 8 mL, respectively.

[0591] Two deaths occurred on study due to progressive disease (neither was attributed to study drug).

[0592] Summaries of AEs, TRAEs, and TRSAEs are provided in Tables 2A-2C, respectively.

TABLE 54A
Adverse Events Summary - All Treated Subjects,
Group 1 and Group 3 - Interim Analysis

| | PART A - GRP 1, N = 22 | | | PART B - GRP 3, N = 10 | | |
|---|---|---|---|---|---|---|
| | Any Grade | Grade 3-4 | Grade 5 | Any Grade | Grade 3-4 | Grade 5 |
| | (%) | (%) | (%) | (%) | (%) | (%) |
| Any AE | 21 (95.5) | 4 (18.2) | 2 (9.1)^{a} | 10 (100) | 2 (20) | 0 |
| Drug- | 10 (45.5) | 1 (4.5) | 0 | 3 (30) | 0 | 0 |
| Related AEs | | | | | | |
| Drug- | 1 (4.5) | 1 (4.5) | 0 | 0 | 0 | 0 |
| Related AEs | | | | | | |
| leading to | | | | | | |
| DC | | | | | | |
| SAEs | 5 (22.7) | 5 (22.7) | 2 (9.1)^{a} | 3 (30) | 3 (30) | 0 |
| Drug- | 1 (4.5) | 1 (4.5) | 0 | 0 | 0 | 0 |
| Related | | | | | | |
| SAEs | | | | | | |

^{a}Grade 5: Death due to Malignant Neoplasm Progression 50 year-old male, RCC with pulmonary metastases; and Death due to Malignant Neoplasm Progression 76 year-old male CRC

TABLE 54B
Drug-Related Adverse Events Summary by Worst CTC Grade - All
Treated Subjects, Group 1 and Group 3 - Interim Analysis

| | PART A - GRP 1 | | | PART B - GRP 3 | | |
|---|---|---|---|---|---|---|
| System Organ Class (%) | N = 22 | | | N = 10 | | |
| Preferred Term (%) | Any Grade | Grade 3-4 | Grade 5 | Any Grade | Grade 3-4 | Grade 5 |
| TOTAL SUBJECTS WITH AN EVENT | 10 (45.5) | 1 (4.5) | 0 | 3 (30.0) | 0 | 0 |
| General disorders and administration site conditions | 4 (18.2) | 0 | 0 | 2 (20.0) | 0 | 0 |
| Fatigue | 2 (9.1) | 0 | 0 | 0 | 0 | 0 |
| Injection site erythema | 2 (9.1) | 0 | 0 | 1 (10.0) | 0 | 0 |
| Administration site erythema | 0 | 0 | 0 | 1 (10.0) | 0 | 0 |
| Injection site irritation | 1 (4.5) | 0 | 0 | 0 | 0 | 0 |
| Injection site pruritus | 0 | 0 | 0 | 1 (10.0) | 0 | 0 |
| Injection site swelling | 1 (4.5) | 0 | 0 | 1 (10.0) | 0 | 0 |
| Musculoskeletal and connective tissue disorders | 3 (13.6) | 0 | 0 | 0 | 0 | 0 |
| Arthralgia | 2 (9.1) | 0 | 0 | 0 | 0 | 0 |
| Arthritis | 1 (4.5) | 0 | 0 | 0 | 0 | 0 |
| Psoriatic arthropathy | 1 (4.5) | 0 | 0 | 0 | 0 | 0 |
| Endocrine disorders | 2 (9.1) | 0 | 0 | 0 | 0 | 0 |
| Hyperthyroidism | 2 (9.1) | 0 | 0 | 0 | 0 | 0 |
| Skin and subcutaneous tissue disorders | 2 (9.1) | 0 | 0 | 2 (20.0) | 0 | 0 |
| Pruritus | 2 (9.1) | 0 | 0 | 0 | 0 | 0 |
| Livedo reticularis | 0 | 0 | 0 | 1 (10.0) | 0 | 0 |
| Rash macular | 0 | 0 | 0 | 1 (10.0) | 0 | 0 |
| Cardiac disorders | 1 (4.5) | 1 (4.5) | 0 | 0 | 0 | 0 |
| Cardiac failure congestive | 1 (4.5) | 1 (4.5) | 0 | 0 | 0 | 0 |
| Gastrointestinal disorders | 1 (4.5) | 0 | 0 | 0 | 0 | 0 |
| Diarrhoea | 1 (4.5) | 0 | 0 | 0 | 0 | 0 |
| Injury, poisoning and procedural complications | 1 (4.5) | 0 | 0 | 0 | 0 | 0 |
| Infusion related reaction | 1 (4.5) | 0 | 0 | 0 | 0 | 0 |
| Renal and urinary disorders | 1 (4.5) | 1 (4.5) | 0 | 0 | 0 | 0 |
| Tubulointerstitial nephritis | 1 (4.5) | 1 (4.5) | 0 | 0 | 0 | 0 |

TABLE 54C
Drug-Related Serious Adverse Events Summary - All Treated
Subjects, Group 1 and Group 3 - Interim Analysis

| | PART A - GRP 1 | | | PART B - GRP 3 | | |
|---|---|---|---|---|---|---|
| System Organ Class (%) | N = 22 | | | N = 10 | | |
| Preferred Term (%) | Any Grade | Grade 3-4 | Grade 5 | Any Grade | Grade 3-4 | Grade 5 |
| TOTAL SUBJECTS WITH AN EVENT | 1 (4.5) | 1 (4.5) | 0 | 0 | 0 | 0 |
| Cardiac disorders | 1 (4.5) | 1 (4.5) | 0 | 0 | 0 | 0 |
| Cardiac failure congestive | 1 (4.5) | 1 (4.5) | 0 | 0 | 0 | 0 |
| Renal and urinary disorders | 1 (4.5) | 1 (4.5) | 0 | 0 | 0 | 0 |
| Tubulointerstitial nephritis | 1 (4.5) | 1 (4.5) | 0 | 0 | 0 | 0 |

[0593] Population Pharmacokinetic Analysis of Combined Nivolumab SC/IV Data

[0594] A population pharmacokinetic (PPK) modeling and simulation approach was employed to characterize SC nivolumab PK and optimize dose selection for SC nivolumab. The objective of this modeling based analysis was to build a PPK model that describes nivolumab concentration data when administered by both SC and IV routes of administration. Nivolumab concentration data following first dose SC administration from the ongoing trial Parts A and B were available from 29 subjects across 2 dose levels including 720 mg SC nivolumab+rHuPH20 (Part A—Group 1) and 960 mg SC nivolumab+rHuPH20 (Part B—Group 3). These SC data were pooled with the existing IV concentration data in order to develop a combined SC/IV PPK model for nivolumab. An extravascular absorption component was added to the existing established IV PPK model and subsequently the appropriate parameters for absorption including BA (F1) and absorption rate constant (ka) were estimated. Estimates of PK parameters from the combined SC/V model are summarized in Table 55.

TABLE 55
Estimates of PK Parameters from the Combined SC/IV PPK Model of Nivolumab

| | | | |
|---|---|---|---|
| Parameters^{a,b} | | Standard Error | 95% Confidence |
| [Units] | Estimate^{c} | (RSE %)^{d} | Interval^{e,BS} |

Fixed Effects

| | | | | |
|---|---|---|---|---|
| CL [L/h] | 0.0109 | 3.17E−04 | (2.90) | 0.0105-0.0114 |
| VC [L] | 4.26 | 0.0398 | (0.936) | 4.19-4.32 |
| Q [L/h] | 0.0335 | 0.00203 | (6.07) | 0.0305-0.0377 |
| VP [L] | 2.61 | 0.0831 | (3.18) | 2.46-2.73 |
| CL_{BBWT} | 0.588 | 0.0315 | (5.36) | 0.532-0.639 |
| CL_{GFR} | 0.147 | 0.0230 | (15.6) | 0.111-0.184 |
| CL_{SEX} | −0.163 | 0.0161 | (9.83) | −0.191-−0.137 |
| CL_{PS} | 0.165 | 0.0137 | (8.32) | 0.141-0.187 |
| CL_{OTH} | 0.0243 | 0.0184 | (76.0) | −0.005-0.0537 |
| VC_{BBWT} | 0.628 | 0.0358 | (5.70) | 0.570-0.685 |
| VC_{SEX} | −0.136 | 0.0180 | (13.2) | −0.167-−0.107 |
| CL_{GC} | 0.185 | 0.0489 | (26.5) | 0.101-0.267 |
| CL_{EMAX} | −0.316 | 0.0321 | (10.2) | −0.377-−0.275 |
| CL_{T50} | 1.40E+03 | 73.7 | (5.27) | 1.27E+03-1.52E+03 |
| CL_{HILL} | 2.78 | 0.512 | (18.4) | 2.06-3.78 |
| CL_{RAAA} | 0.0573 | 0.0396 | (69.1) | −0.0066-0.122 |
| CL_{RAAS} | −0.0766 | 0.0258 | (33.7) | −0.121-−0.0356 |
| CL_{CHL} | −0.321 | 0.0272 | (8.47) | −0.366-−0.275 |
| KA | 0.0127 | 0.00121 | (9.52) | 0.0108-0.0151 |
| F1 | 0.676 | 0.0430 | (6.36) | 0.60-0.75 |

Random Effects

| | | | | |
|---|---|---|---|---|
| ω2CL [—] | 0.112 (0.335) | 0.00560 | (5.00) | 0.102-0.120 |
| ω2VC [—] | 0.127 (0.356) | 0.0138 | (10.9) | 0.102-0.150 |
| ω2VP [—] | 0.231 (0.480) | 0.0245 | (10.6) | 0.194-0.282 |
| ω2EMAX [h] | 0.0504 (0.224) | 0.00893 | (17.7) | 0.0379-0.0664 |
| ω2KA | 0.172 (0.414) | 0.0634 | (36.9) | 0.070-0.262 |
| ω2F1 | 0.625 (0.791) | 0.239 | (38.2) | 0.230-1.046 |
| ω2CL:ω2VC | 0.0354 (0.297) | 0.00347 | (9.80) | 0.0294-0.0419 |
| ω2KA:F1 | 0.253 (0.773) | 0.0684 | (27.0) | 0.127-0.360 |

Residual Error

| | | | | |
|---|---|---|---|---|
| Proportional | 0.205 | 0.00512 | (2.50) | 0.196-0.213 |
| Error^{f} | | | | |

^{a}Parameters with fixed values (not estimated) are denoted with a superscript ‘f’ after the names, with the fixed value given in the Estimate column.
^{b}Random Effects and Residual Error parameter names containing a colon (:) denote correlated parameters.
^{c}Random Effects and Residual Error parameter estimates are shown as Variance (Standard Deviation) for diagonal elements (ωi, i or σi, i)) and Covariance (Correlation) for off-diagonal elements (ωi, i or σi, i).
^{d}RSE % is the relative standard error (Standard Error as a percentage of Estimate).
^{e}Confidence intervals of Random Effects and Residual Error parameters are for Variance or Covariance.
^{BS}Confidence Interval values are taken from bootstrap calculations (934 successful out of a total of 1000).

[0595] The structural PK model consisted of 2 compartments: zero-order absorption for IV administration and first-order absorption for SC administration. The model-determined BA of nivolumab was 67% with high precision (95% CI: 60%-75%). PPK modeling and simulation approach was employed to characterize SC nivolumab PK and optimize dose selection for SC nivolumab. The objective of this modeling based analysis was to build a PPK model that describes nivolumab concentration data when administered by both SC and IV routes of administration. Nivolumab concentration data following first dose SC administration from the ongoing trial (Parts A and B) were available from 29 subjects across 2 dose levels including 720 mg SC nivolumab+rHuPH20 (Part A—Group 1) and 960 mg SC nivolumab+rHuPH20 (Part B—Group 3). These SC data were pooled with the existing IV concentration data in order to develop a combined SC/IV PPK model for nivolumab. An extravascular absorption component was added to the existing established IV PPK model and subsequently the appropriate parameters for absorption including BA (F1) and absorption rate constant (ka) were estimated. Estimates of PK parameters from the combined SC/IV model are summarized in Table 55.

[0596] The structural PK model consisted of 2 compartments: zero-order absorption for IV administration and first-order absorption for SC administration. The model-determined BA of nivolumab was 67% with high precision (95% CI: 60%-75%). PPK modeling and simulation approach was employed to characterize SC nivolumab PK and optimize dose selection for SC nivolumab. The objective of this modeling based analysis was to build a PPK model that describes nivolumab concentration data when administered by both SC and IV routes of administration. Nivolumab concentration data following first dose SC administration from the ongoing CA2098KX (Parts A and B) were available from 29 subjects across 2 dose levels including 720 mg SC nivolumab+rHuPH20 (Part A—Group 1) and 960 mg SC nivolumab+rHuPH20 (Part B—Group 3). These SC data were pooled with the existing IV concentration data in order to develop a combined SC/IV PPK model for nivolumab. An extravascular absorption component was added to the existing established IV PPK model and subsequently the appropriate parameters for absorption including BA (F1) and absorption rate constant (ka) were estimated. Estimates of PK parameters from the combined SC/IV model are summarized in Table 55.

[0597] The structural PK model consisted of 2 compartments: zero-order absorption for IV administration and first-order absorption for SC administration. The model-determined BA of nivolumab was 67% with high precision (95% CI: 60%-75%).

[0598] The combined SC/IV PPK model underwent an internal validation exercise to ensure that the model was able to predict the observed concentration values following SC administration. Visual predictive checks (FIG. 4) suggested that the combined SC/IV model adequately captured and described the observed SC nivolumab concentration data.

[0599] Using the model described above, deterministic simulations were conducted to generate exposure measures for the subjects treated with available PK data in CA2098KX. Summary of the exposure measures by dose level are provided in Table 56.

TABLE 56
Summary of Predicted Exposures in Treated Subjects by Dose Level

| | Cavgd28 (ug/ml) | Cmind28 (ug/ml) | | Cmax1 (ug/ml) | Tmax1 (hours) | |
|---|---|---|---|---|---|---|
| Dose SC Q4W | GeoMean(% CV) | GeoMean(% CV) | | GeoMean(% CV) | Mean (SD) | |
| 720 mg (N = 22) | 36.9 (44.2) | 22 | (56.8) | 51.3 (24.7) | 141 | (63.8) |
| 960 mg (N = 9) | 61.8 (27.2) | 40.6 | (24.3) | 83.5 (31.3) | 136 | (48) |

Abbreviations: Cavgd28 = average concentration at day 28; Cmax1 = maximum concentration after the first dose; Cmind28 = minimum concentration at day 28; CV = coefficient of variation; GeoMean = geoetric mean; Q4W = every 4 weeks; SC = subcutaneous; SD = standard deviation; Tmax1 = time to maximum plasma concentration after the first dose.

[0600] Single Arm Expansion Cohort of RCC Subjects

[0601] The trial will be expanded to include a single-arm, single-tumor, expansion cohort (Part E) with advanced/metastatic RCC (FIG. 3). The primary objective of Part E is to demonstrate PK non-inferiority of SC nivolumab 1200 mg+rHuPH20 (co-formulation) Q4W versus IV dosing (3 mg/kg Q2W) by comparing the model-predicted SC and IV exposures. Non-inferiority is defined as the lower limit of the two-sided 90% CI of the geometric mean ratio of at least 0.8 for the measure of exposure (co-primary endpoints: Cavgd28; Cmind28). Demonstration of Cavgd28 and Cmind28 non-inferiority will ensure that efficacy of SC nivolumab Q4W will be maintained at a level comparable to IV nivolumab 3 mg/kg Q2W.

[0602] Secondary objections of Part E are (i) to evaluate PK of SC nivolumab co-formulated with rHuPH20; (ii) to evaluate the safety profile of SC nivolumab co-formulated with rHuPH20; (iii) to evaluate the immunogenicity of nivolumab; and (iv) to evaluate investigator-assessed response. Secondary endpoints include (i) Cmax1, AUC(TAU), Cavg(ss), and Cmin(ss); (ii) incidences of AEs, SAEs, AEs leading to discontinuation, deaths, and laboratory abnormalities; (iii) incidence of anti-nivolumab antibodies and neutralizing antibodies, if applicable; and (iv) ORR. Exploratory objectives include (i) to explore efficacy in all participants; (ii) to explore biomarker measures of immune function and tumor genetics and genomics; (iii) to explore the immunogenicity of rHuPH20; and (iv) to explore participant experience with SC nivolumab. Exploratory endpoints include (i) PFS, OS, time to response, and duration of response; (ii) change from baseline in different biomarkers and molecular characteristics of the tumor/blood; (iii) incidence of anti-rHuPH20 antibodies and neutralizing antibodies, if applicable; and (iv) patient experience/preference questionnaire and qualitative patient interviews.

[0603] Selection of RCC as the tumor type for Part E is supported by extensive historical PK data and well-established PPK and E-R models for IV nivolumab in tumor type. Nivolumab E-R curves for efficacy and safety in RCC were flat in the dose range of 1 mg/kg to 10 mg/kg (data not shown). Given the well-established flat E-R relationship in RCC and melanoma across a wide range of tested doses, the benefit/risk assessment of SC nivolumab in Part E can reasonably support extrapolation to all tumor types where IV nivolumab has proven to be safe and efficacious. Selection of 3 mg/kg IV Q2W as the virtual IV treatment arm is based on: robust data on exposure, efficacy, and safety for 3 mg/kg IV Q2W. Most studies, including pivotal studies for all approved indications, evaluated nivolumab at a dose of 3 mg/kg IV Q2W. Well-characterized efficacy, safety, and PK profiles are, therefore, available for this dose. Well-established E-R in RCC and melanoma that spans the 3 mg/kg IV Q2W regimen showed no significant association of exposure and safety/efficacy. Demonstration of PK non-inferiority of SC dose versus the 3 mg/kg Q2W IV dose is sufficient to conclude that the benefit-risk profile of SC nivolumab would be comparable to IV nivolumab in advanced/metastatic RCC and by extrapolation to other tumor types for the following reasons:

[0604] Efficacy of 3 mg/kg IV Q2W has been demonstrated in dose ranging and pivotal studies conducted across tumor types. Therefore, if similar or greater Cavgd28 and Cmind28 are achieved with the SC dosing regimen of 1200 mg Q4W, then it is expected that the safety and efficacy profile of SC nivolumab would be comparable to IV nivolumab.

[0605] Inclusion/Exclusion Criteria/Patient Characteristics

[0606] Key inclusion criteria include: (i) PD-L1 treatment naïve; (ii) histological confirmation of RCC with a clear cell component (must have received at least 1, and no more than 2, lines of prior systemic treatment regimens in the advanced or metastatic setting, and must have evidence of progression on or after the last treatment regimen received and within 6 months prior to study enrollment); (iii) a formalin-fixed, paraffin-embedded tumor tissue block or unstained slides of tumor sample (archival or recent) for biomarker evaluation is requested for subjects at study entry; (iv) male and female participants must be z 12 years old or age at the time of informed consent; (v) participants must be assessed for tumor PD-L1 expression by immunohistochemistry (IHC); (vi) measurable disease as per Response Evaluation Criteria In Solid Tumors (RECIST) version 1.1 criteria; (vii) participants must have an ECOG performance status of 0 or 1; and (viii) all participants must have the ability to comply with treatment, patient-reported outcomes, PK, pharmacodynamic sample collection, and study follow-up requirements.

[0607] Key exclusion criteria include (i) treatment with botanical preparations (eg, herbal supplements or traditional Chinese medicines) to treat the disease under study within 2 weeks prior to randomization/treatment; (ii) participants with an active autoimmune disease or any other condition requiring systemic treatment with either corticosteroids within 14 days (>10 mg daily prednisone equivalent) or other immunosuppressive medications within 30 days of randomization (inhaled or topical steroids, and adrenal replacement steroid doses >10 mg daily prednisone equivalent, are permitted in the absence of active autoimmune disease); (iii) participants with type I diabetes mellitus, hypothyroidism only requiring hormone replacement, skin disorders (such as vitiligo, psoriasis, or alopecia) not requiring systemic treatment, or conditions not expected to recur in the absence of an external trigger are permitted to enroll; (iv) untreated symptomatic central nervous system (CNS) metastases (patients are eligible if CNS metastases are asymptomatic and do not require immediate treatment, or have been treated and patients have neurologically returned to baseline (except for residual signs or symptoms related to the CNS treatment); in addition, patients must have been either off corticosteroids, or on a stable or decreasing dose of ≤10 mg daily prednisone (or equivalent) for at least 2 weeks prior to enrollment); (v) patients with known human immunodeficiency virus (HIV) who have had an acquired immunodeficiency syndrome (AIDS) defining opportunistic infection within the last year, or a current cluster of differentiation 4 (CD4) count <350 cells/uL; (vi) inadequate organ function based on baseline laboratory assessment; (vii) patients with a concurrent malignancy requiring treatment (patients with a previously treated malignancy are eligible if treatment was completed at least 2 years before registration and the patient has no evidence of disease; and patients who have a concurrent malignancy that is clinically stable and does not require tumor-directed treatment are also eligible); (viii) patients with serious or uncontrolled medical disorders; (ix) serologic evidence of chronic hepatitis B virus (HBV) infection with an HBV viral load above the limit of quantification. Participants with chronic HBV infection must be on concurrent viral suppressive therapy; (x) serologic evidence of current hepatitis C virus (HCV) infection with an HCV viral load above the limit of quantification; (xi) participants who have received a live/attenuated vaccine within 30 days of first treatment; (xii) history of allergy or hypersensitivity to study drug components; and (xiii) prior treatment with an anti-PD-1, anti-PD-L1, anti-cytotoxic T-lymphocyte associated antigen-4 (CTLA-4) antibody, or any other antibody or drug specifically targeting T-cell co-stimulation or checkpoint pathways.

[0608] Rationale for Selection of SC Dose

[0609] A PPK modeling and simulation approach was employed for dose selection for SC nivolumab. Nivolumab concentration data following first dose SC administration from Parts A and B were collected across 2 dose levels co-administered with rHuPH20 (720 mg and 960 mg). These data were pooled with the existing IV concentration data in order to develop a combined SC and IV PPK model for nivolumab. An extravascular absorption component was added to the existing established IV PPK model and subsequently the appropriate parameters for absorption including BA and ka were estimated. Simulations were performed using this combined SC/IV PPK model to predict systemic exposures following administration of a range of doses across the range of body weights. Under the various scenarios that accounted for the potential uncertainty in BA tested, it was determined that a SC nivolumab 1200 mg Q4W regimen would elicit a comparable benefit-risk profile to IV nivolumab 3 mg/kg Q2W. This was based on the rationale that this dosing regimen is capable of delivering Cavgd28 and Cmin28 exposures that are similar to or greater than those associated with the IV nivolumab 3 mg/kg Q2W while maintaining all measures of exposures below those associated with IV nivolumab 10 mg/kg Q2W for all body weights. Additionally, clinical trial simulations under the most conservative scenario considered (low bioavailability, in an RCC population that tends to have higher body weights) suggest that SC nivolumab 1200 mg Q4W has a relatively higher probability than 960 mg Q4W of achieving the non-inferiority criteria in a SC versus IV trial.

[0610] With regards to the anticipated safety profile with the 1200 mg SC dose, predicted exposures are not expected to exceed those produced by nivolumab 10 mg/kg Q2W IV, a dose where safety has been well-characterized and shown to be similar to 3 mg/kg Q2W IV. Given that there were no clinically meaningful differences in incidence of AEs between IV exposures of 3 mg/kg and 10 mg/kg Q2W IV, 1200 mg+rHuPH20 Q4W SC is an appropriate dose, which will provide exposures equal to or greater than 3 mg/kg Q2W IV and within those produced by 10 mg/kg Q2W IV. This will be assessed as part of the amendment underway to characterize actual PK of the 1200 mg SC dose (Parts C and D) and preliminary results will be reviewed prior to the initiation of Part E.

[0611] Further comparisons of the exposures from deterministic simulations for patients in Arms A and B were conducted to ascertain whether there were any differences in exposures of SC nivolumab 1200 mg Q4W relative to 3 mg/kg Q2W based on tumor type. These simulations accounted for individual parameters of absorption, bioavailability, systemic PK parameters and individual covariate information. Across the tumor types collected in this study, there were no apparent trends or differences in geometric mean ratios (GMRs) for all measures of exposures. All GMRs being equal or greater than 1, indicated that tumor type is unlikely to impact the interpretation of non-inferior exposures, and body weight would continue to remain the major contributor to any differences in exposures from SC 1200 Q4W and 3 mg/kg Q2W IV dosing (FIGS. 5A-5C).

### Example 3—Subcutaneous Nivolumab with or without rHuPH20

[0612] In support of the clinical studies with subcutaneous (SC) nivolumab administration, nonclinical study was conducted in cynomolgus monkeys to evaluate local tolerance and systemic exposures to nivolumab when administered twice (3 weeks apart) as a SC formulation with and without rHuPH20. SC nivolumab was supplied at 154.57 mg/mL and was administered by SC injection at doses of 0 mg/kg (vehicle), 50 mg/kg (no rHuPH20), or 50 mg/kg (with rHuPH20, 2000 U/mL), twice (Days 1 and 22/20 [males/females]), to groups of 3 monkeys per sex. All doses were administered at 0.5 mL/kg in a vehicle/carrier consisting of 20 mM histidine, 250 mM sucrose, 0.05% polysorbate-80, and 50 μM pentetic acid (histidine buffer). Samples for toxicokinetic analysis were collected following dosing on Day 1 and scheduled necropsies were conducted at 72 hours following dosing on Day 22/21 (males/females).

[0613] Mean nivolumab systemic exposures (AUC[0-T]) at 50 mg/kg with rHuPH20 were generally similar to those without rHuPH20 (Table 57). Mean time to maximum plasma concentration (Tmax) was 32 hours or 68 hours post-dose with or without rHuPH20, respectively. These results demonstrate that, despite an earlier Tmax with rHuPH20 co-administration, rHuPH20 had no substantial impact on the overall nivolumab systemic exposure in this non-clinical study.

TABLE 57
Toxicokinetic Summary - Mean Sex-combined Values

| | All Monkeys/Exclusion of Monkeys with Detectable | |
|---|---|---|
| | Treatment-emergent Anti-nivolumab Antibodies^{a} | |
| | Nivolumab 50 mg/kg | Nivolumab 50 mg/kg |
| Parameter | (no rHuPH20) | (with rHuPH20) |
| AUC(0-T) | 187,000/166,000 | 184,000/182,000 |
| (μg · h/mL) | | |
| Cmax (μg/mL) | 537/454 | 647/647 |
| Tmax (h) | 68/60 | 32/24 |

Abbreviations: AUC = area under the concentration-time curve; Cmax = maximum concentration; Tmax = time to maximum plasma concentration.
^{a}Values were calculated with all/exclusion of monkeys with detectable treatment-emergent anti-nivolumab antibodies.

[0614] Treatment-emergent nivolumab anti-drug antibodies (ADAs) were detected in 1 of 6 monkeys either with or without rHuPH20. However, in general, the presence of treatment-emergent ADAs had no substantial impact on nivolumab exposure.

[0615] Nivolumab, administered at 50 mg/kg with and without rHuPH20 (2000 U/mL), was well-tolerated with no clinical observations and no local tolerance issues at the SC injection sites and there were no meaningful differences in exposure to nivolumab in the presence or absence of rHuPH20 in this non-clinical study.

### Example 3—Subcutaneous Nivolumab in Combination with Recombinant Human Hyaluronidase in Previously Treated Advanced, Recurrent, or Metastatic Non-Small Cell Lung Cancer

[0616] A phase 3 study will be performed to evaluate the administration of subcutaneous (SC) nivolumab coformulated with recombinant human PH20 (rHuPH20) versus intravenous (IV) nivolumab in participants with previously treated advanced, recurrent, or metastatic non-small cell lung cancer (NSCLC). This study seeks to establish pharmacokinetic (PK) and efficacy non-inferiority of 1200 mg of nivolumab coformulated with 20,000 Units of rHuPH20 administered SC every 4 weeks (Q4W) compared with 3 mg/kg nivolumab administered IV every 2 weeks (Q2W). Throughout the protocol, the coformulation of nivolumab and rHuPH20 will be referred to as SC nivolumab and the IV formulation of nivolumab will be referred to as IV nivolumab.

[0617] Males or females 18 years of age or older (or local age of majority) with histologically confirmed Stage IIIB/IIIC/IV NSCLC (squamous or non-squamous) who have experienced disease recurrence or progression during or after 1 prior systemic therapy for advanced or metastatic disease. Objectives and endpoints are presented in Table 58.

TABLE 58
Objectives and Endpoints

| | |
|---|---|
| Objective | Endpoint |

Co-Primary

| | |
|---|---|
| To demonstrate PK non-inferiority of | Cmind28 |
| SC nivolumab 1200 mg Q4W versus | |
| IV nivolumab 3 mg/kg Q2W. | |
| To demonstrate ORR non-inferiority | ORR by BICR with a minimum of 6 months |
| of SC nivolumab 1200 mg Q4W | follow-up |
| versus IV nivolumab 3 mg/kg Q2W . . . | |

Secondary

| To evaluate the PK of SC nivolumab | Cavgd28, Cmax1, Tmax, Cminss, Cavgss | |
|---|---|---|
| 1200 mg Q4W and IV nivolumab 3 | | |
| mg/kg Q2W. | | |
| To evaluate the efficacy of SC | 1) | ORR by BICR with a minimum of 12 of |
| nivolumab 1200 mg Q4W and IV | | months follow-up and at end of study |
| nivolumab 3 mg/kg Q2W. | 2) | DCR by BICR with a minimum of 6 and 12 |
| | | months of follow-up and at end of study |
| | 3) | PFS with a minimum of 6 and 12 months of |
| | | follow-up and at end of study |
| | 4) | OS with a minimum of 6 and 12 months of |
| | | follow-up and at end of study |
| | 5) | DoR with a minimum of 6 and 12 months of |
| | | follow-up and at end of study |
| | 6) | TTR with a minimum of 6 and 12 months of |
| | | follow-up and at end of study |
| To evaluate the safety profile of SC | 7) | Incidences of AEs, SAEs, AEs leading to |
| nivolumab and IV nivolumab. | | discontinuation, deaths, and laboratory |
| | | abnormalities |

| | |
|---|---|
| To evaluate AEs in the broad | Incidence of anaphylactic, hypersensitivity, |
| standardized MedDRA query (SMQ) | and systemic infusion reactions. |
| of Anaphylactic Reaction, in SC | Incidence of injection and local infusion site |
| nivolumab arm and in IV nivolumab | reactions occurring within 2 days of study |
| arms | drug administration |
| To evaluate the immunogenicity of SC | Percentage of participants who develop anti- |
| nivolumab and IV nivolumab | nivolumab antibodies and neutralizing |
| | antibodies, if applicable |

Exploratory

| | |
|---|---|
| To explore translational biomarkers | Summary measures of change (or % change) |
| for SC nivolumab and IV nivolumab | from baseline in intratumoral markers of |
| clinical activity | tumor inflammation |
| | Summary measures of change (or % change) |
| | from baseline in peripheral markers of |
| | immune activation |
| | Summary measures of baseline levels of |
| | intratumoral and peripheral biomarkers in |
| | both treatment arms to identify potential |
| | imbalances |
| To explore the immunogenicity of | Percentage of participants who develop anti- |
| rHuPH20 | rHuPH20 antibodies and neutralizing |
| | antibodies, if applicable and the impact of |
| | anti-rHuPH20 antibodies on AEs, |
| | administration related reactions, and events |
| | within MedDRA SMQ anaphylactic reactions |
| To explore the impact of | Percentage of participants who develop anti- |
| immunogenicity of SC nivolumab and | nivolumab antibodies and neutralizing |
| IV nivolumab | antibodies, if applicable, the impact of anti- |
| | nivolumab antibodies on AEs, administration- |
| | related reactions, and events within MedDRA |
| | SMQ anaphylactic reactions |
| To explore the participant experience | Percentage of participants who prefer SC and |
| and preference with SC nivolumab | the percentage of participants who prefer IV |
| | treatment through PEPQ (Arm A only, SC |
| | nivolumab) |
| To explore changes in disease-related | Mean NSCLC-SAQ scores at baseline and |
| symptoms and impacts on health- | post-baseline score changes |
| related quality of life in the IV and SC | |
| arms | |
| To explore changes in health status | Mean EQ-5D-5L utility and visual analogue |
| and health-related quality of life in the | scale scores and post-baseline score changes |
| IV and SC arms | |

Abbreviations: AE = adverse event; BICR = blinded independent central review; CminD28 = minimum serum concentration over 28 days; Cavgd28 = average serum concentration at day 28; Cmax1 = maximum serum concentration after the first dose; Cminss = steady state trough concentration; Cavgss = steady state average serum concentration; DCR = disease control rate; DoR = duration of response; IV = intravenous; MedDRA = Medical Dictionary for Regulatory Activities; ORR = objective response rate; OS = overall survival; PFS = progression-free survival; PK = pharmacokinetic; Q2W = every 2 weeks; Q4W = every 4 weeks; rHuPH20 = recombinant human hyaluronidase PH20; SAE = serious adverse event; SC = subcutaneous; SMQ = standardized MedDRA queries; Tmax = time at which Cmax1 is attained; TTR = time to response.

[0618] Overall Design

[0619] The present study is a multicenter, randomized, open-label, Phase 3 study that will evaluate PK and efficacy non-inferiority of SC nivolumab versus IV nivolumab and safety and tolerability of SC nivolumab in participants with advanced, recurrent, or metastatic NSCLC.
[0620] Arm A (n=257): SC nivolumiab coformulation of 1200 mg of nivolumab with 20,000 units of rHuPH20 Q4W±7 days; and
[0621] Arm B (n=257): IV nivolumab 3 mg/kg Q2W±3 days (FIG. 6).

[0622] Approximately 514 total participants will be randomized in a 1:1 fashion into the following treatment groups: randomization into treatment groups will be stratified by histology (squamous versus nonsquamious), PD-L1 score (≥1% versus <1% versus indeterminate), weight (<65 kg versus 65-90 kg versus >90 kg), and Eastern Cooperative Oncology Group performance status ECOG-PS (0 versus 1) (FIG. 6). ECOG PS must be assessed within 14 days prior to randomization. Dosing in this study will continue until disease progression per Response Evaluation Criteria in Solid Tumors (RECIST) v.1.1, unacceptable toxicity, withdrawal of consent, completion of 104 weeks of treatment, death, or study termination by the Sponsor, whichever occurs first.

[0623] On study tumor assessments should consist of contrast enhanced CT of the chest, CT/MRI of the abdomen, pelvis, and all other known and/or suspected sites of disease should occur every 8 weeks (f 7 days) starting from randomization for 2 years (104 weeks), then every 12 weeks (f 7 days) until disease progression and treatment discontinuation (including treatment beyond progression), whichever occurs later. Partial response (PR) and complete response (CR) must be assessed and confirmed at least 4 weeks following initial assessment. Tumor response will be assessed using RECIST 1.1.

[0624] Serial blood samples will be collected during Cycle 1 in Arm A and during Cycles 1 and 2 in Arm B, followed by predose PK samples throughout the treatment period in both Arms A and B to characterize the PK and immunogenicity of nivolumab.

[0625] Safety monitoring will consist of physical examinations, vital sign measurements, and clinical laboratory evaluations at selected times throughout the dosing interval. Participants will be closely monitored for AEs throughout the study. Collection of AEs and severity per National Cancer Institute Common Terminology Criteria for Adverse Events (NCI CTCAE) v.5 criteria will also include local injection-site reactions after SC administration and IV infusion related reactions.

[0626] Justification for Dose

[0627] PK data from participants enrolled in the study, where nivolumab (720 mg, 960 mg, and 1200 mg) was administered SC with or without rHuPH20, and historical IV data across several tumor types (data from approximately 3000 patients) were used to characterize the absorption profile of nivolumab when given subcutaneously. Population PK (PPK) analysis estimated the mean (90% CI) bioavailability to be 70% (66-74%) and first order rate of absorption to be 0.250 (90% CI: 0.225-0.274) day⁻¹. All other PK parameters and effects of covariates on these parameters were consistent with those estimated previously with the IV PPK model. The model estimated exposures with SC nivolumab 1200 mg Q4W and IV nivolumab 3 mg/kg Q2W are presented in Table 59. Based on these results, the SC nivolumab dose of 1200 mg Q4W nivolumab is expected to provide similar or higher exposures across all body weight ranges as compared to IV nivolumab 3 mg/kg Q2W. Also the geometric mean exposures with nivolumab administered SC 1200 mg Q4W are lower than the exposure from the highest tolerated IV dose of 10 mg/kg Q2W and are considered safe (FIG. 7).

TABLE 59
Model Estimated Exposures for SC Nivolumab
(with rHUPH20) and IV Nivolumab
Geometric Mean (% CV)

| | Cavgd28 | | Cmind28 | Cmax1 |
|---|---|---|---|---|
| Dose | (μg/mL) | | (μg/mL) | (μg/mL) |
| 1200 mg Q4W SC | 65.50 | (35.10) | 40.40 (41.50%) | 93.00 (38.10%) |
| 3 mg/kg Q2W IV | 40.20 | (29.40%) | 27.40 (35.20%) | 57.80 (37.70%) |

Abbreviations: Cavgd28 = average serum concentration on Day 28; Cmax1 = maxiumum serum concentration after the first dose; Cmind28 = minimum serum concenration on Day 28; CV = coefficient of variation; IV = intravenous; Q4W = every 4 weeks; Q2W = every 2 weeks; SC = subcutaneous.

[0628] Inclusion Criteria

[0629] Participants must have histologically confirmed NSCLC (squamous or non-squamous) and present with Stage IIIB/IIIC/IV disease (according to version 8 of the International Association for the Study of Lung Cancer Staging Manual in Thoracic Oncology) or with recurrent or progressive disease (according to RECIST 1.1 criteria) following multimodal therapy (radiation therapy, surgical resection, or definitive chemo radiotherapy for locally advanced disease). Participants must have measurable disease by CT or MRI per RECIST 1.1 criteria within 28 days prior to first treatment dose. Participants must have an ECOG performance status of 0 or 1 assessed within 14 days of randomization. Participants must have experienced disease recurrence or progression during or after 1 prior systemic therapy for advanced or metastatic disease.

[0630] Maintenance therapy following platinum doublet-based chemotherapy is not considered as a separate regimen of therapy. Participants who received pemetrexed, bevacizumab, or erlotinib as maintenance therapy (non-progressors with platinum-based doublet chemotherapy) and progressed are eligible. Participants who have received adjuvant or neoadjuvant platinum-doublet chemotherapy (after surgery and/or radiation therapy) and developed recurrent or metastatic disease within 6 months of completing therapy are eligible. Participants with recurrent disease >6 months after adjuvant or neoadjuvant platinum-based chemotherapy, who also subsequently progressed during or after a platinum-doublet regimen given to treat the recurrences, are eligible.

[0631] All participants with non-squamous histology must have been tested for EGFR mutation status (including, but not limited to, deletions in exon 19 and exon 21 [L858R] substitution); the use of regulatory-approved test is strongly encouraged. Participants who are positive on sensitizing EGFR mutations should have progressive disease after receiving one prior approved EGFR inhibitor. Participants with non-squamous histology who have a known ALK translocation should have progressive disease after receiving one prior approved ALK inhibitor. ALK mutation testing is not required for this study.

[0632] Participants with symptomatic tumor lesions at baseline who may require palliative radiotherapy within 4 weeks of the first dose of study treatment are strongly encouraged to receive palliative radiotherapy prior to enrollment. Palliative radiotherapy should be completed 2 weeks prior to the first dose. Target lesions may be located in a previously irradiated field if there is documented (radiographic) disease progression (following RECIST 1.1 criteria) in that site.

[0633] Participants with chronic obstructive pulmonary disorder (COPD) that is controlled at study entry are eligible.

[0634] A formalin fixed, paraffin-embedded (FFPE) tumor tissue block or a minimum of 20 unstained slides of tumor tissue obtained from core biopsy, punch biopsy, excisional biopsy, or surgical specimen prior to enrollment (within 12 weeks of enrollment) with no intervening systemic anti-cancer treatment between time of acquisition and treatment randomization in IRT. If despite efforts, a minimum of 20 slides are not obtainable, submission of fewer slides may be acceptable in some circumstances following discussion with the Medical Monitor or designee. If tumor tissue obtained within 12 weeks of enrollment is not available, an archival tissue block (within approximately 12 months of enrollment) with no intervening systemic anti-cancer treatment between time of acquisition and treatment randomization in IRT may be submitted. Fine needle aspirates and other cytology samples are not acceptable. Assessment of tumor-cell PD-L1 expression by IHC must be performed by analyzing lab using pre-treatment tissue sample. Analyzing lab must provide IRT with PD-L1 results prior to randomization.

[0635] Exclusion Criteria

[0636] Participants with an active autoimmune disease or any other condition requiring systemic treatment with either corticosteroids within 14 days (>10 mg daily prednisone equivalent) or other immunosuppressive medications within 30 days of randomization. Inhaled or topical steroids, and adrenal replacement steroid doses >10 mg daily prednisone equivalent, are permitted in the absence of active autoimmune disease. Known history of positive test for human immunodeficiency virus (HIV) or known acquired immunodeficiency syndrome (AIDS).

[0637] Participants with type I diabetes mellitus, hypothyroidism only requiring hormone replacement, skin disorders (such as vitiligo, psoriasis, or alopecia) not requiring systemic treatment, or conditions not expected to recur in the absence of an external trigger are permitted to enroll.

[0638] Participants with untreated symptomatic CNS metastases. Participants are eligible if CNS metastases are asymptomatic and do not require immediate treatment, or have been treated and patients have neurologically returned to baseline (except for residual signs or symptoms related to the CNS treatment). In addition, participants must have been either off corticosteroids, or on a stable or decreasing dose of ≤10 mg daily prednisone (or equivalent) for at least 2 weeks prior to enrollment.

[0639] Participants with a concurrent malignancy requiring treatment. Participants with a previously treated malignancy are eligible if treatment was completed at least 2 years before randomization and the patient has no evidence of disease. Patients who have a concurrent malignancy that is clinically stable and does not require tumor-directed treatment are also eligible.

[0640] Participants with interstitial lung disease that is symptomatic or may interfere with the detection or management of suspected drug-related pulmonary toxicity.

[0641] Participants who have received treatment with botanical preparations (e.g. herbal supplements or traditional Chinese medicines) to treat the disease under study within 2 weeks prior to randomization/treatment. Participants who have received a live/attenuated vaccine within 30 days of first treatment. Participants who have received prior treatment with an anti-PD-1, anti-PD-L1, anti-CTLA 4 antibody, or any other antibody or drug specifically targeting T-cell co-stimulation or checkpoint pathways.

[0642] Inadequate organ function based on baseline laboratory assessments include (i) white blood cell (WBC)<2000/μL; (ii) neutrophils <1500/μL; (iii) platelets <100 x103/μL; (iv) hemoglobin <9.0 g/dL; (v) serum creatinine >1.5× upper limit of normal (ULN), unless creatinine clearance ≥40 mL/min (measured or calculated using the Cockroft-Gault formula); (vi) aspartate aminotransferase (AST)/alanine aminotransferase (ALT): >3.0×ULN; (vii) total bilirubin >1.5×ULN (except participants with Gilbert Syndrome who must have a total bilirubin level of <3.0×ULN); and (viii) any positive test result for HBV or HCV virus indicating presence of virus, eg, Hepatitis B surface antigen (HBsAg, Australia antigen) positive, or Hepatitis C antibody (anti-HCV) positive (except if HCV-RNA negative).

[0643] Subcutaneous Administration of Nivolumab with rHuPH20 (Arm A)

[0644] SC nivolumab should be administered on Day 1 of each treatment cycle every 4 weeks±7 days, until progression, unacceptable toxicity, withdrawal of consent, completion of 104 weeks (2 years) of treatment, death, or the study ends, whichever occurs first. Participants should begin study treatment within 3 calendar days of randomization.

[0645] There will be no dose escalations or reductions of nivolumab allowed. Participants may be dosed no less than 25 days from the previous dose for Q4W cycles. Premedications are not recommended for the first dose of nivolumab.

[0646] Doses of nivolumab may be interrupted, delayed, or discontinued depending on how well the participant tolerates the treatment. Dosing visits are not skipped, only delayed

[0647] SC Nivolumab will be administrated via manual injection in one of the quadrants of the abdomen for the first cycle. For subsequent cycles, one of the four quadrants of the abdomen and either thigh are options, and injection sites should be alternated. SC administration should occur as steadily as possible (i.e., no start or stop, and at a steady rate) over a period of approximately 3-5 minutes. Participants will be monitored for approximately 360 minutes following the Cycle 1 Day 1 and Cycle 2 Day 1 SC manual injections of SC nivolumab. Participants receiving subsequent SC injections may be monitored for approximately 30 minutes post injection as clinically warranted and at the discretion of the investigator. In addition, all participants will be contacted approximately 24 hours after each SC injection for reporting of any injection-site reactions. The injection site will be also be evaluated at the next study visit. The site of SC injection, duration, and needle type must be recorded in the electronic case report form (eCRF). Instructions for preparation of the SC nivolumab dose are provided in the Pharmacy Manual.

### Example 4—Subcutaneous Nivolumab with or without rHuPH20

[0648] In an ongoing phase 1/2 study, checkpoint inhibitor-naïve patients (pts) who were ≥18 years of age, ECOG PS 0-1, with metastatic/unresectable solid tumors and measurable disease were administered varying doses of nivolumab, with our without rHuPH20. The primary objective was to describe subcutaneous nivolumab pharmacokinetics (PK); and secondary objectives were safety and immunogenicity. Additional analyses compared exposures to historical IV nivolumab. In cycle 1, patients in Part A received subcutaneous nivolumab 720 mg+rHuPH20, and patients in Part B received subcutaneous nivolumab 720 mg, subcutaneous nivolumiab 960 mg+rHuPH20, or subcutaneous nivolumab 960 mg. For cycles 2+, patients in Parts A and B received IV nivolumiab 480 mg every 4 weeks (Q4W). Patients still on study switched to Part C, subcutaneous nivolumab 1200 mg+rHuPH20 until end of therapy. In Part D, patients received de novo subcutaneous nivolumab 1200 mg+rHuPH20 Q4W. Subcutaneous injection was a single injection into the abdomen or thigh.

[0649] Patient characteristics varied by age, weight, tumor type, and prior treatment. Baseline demographics and disease characteristics for Parts C and D are shown in Table 60. Tumor types in Part A included non-small cell lung cancer (NSCLC), renal cell carcinoma (RCC), melanoma (Mel), hepatocellular carcinoma (HCC), and microsatellite instability-high/mismatch repair deficient colorectal cancer (MSI-H/dMMR CRC).

TABLE 60
Baseline demographics/disease characteristics for Parts C and D

| | Part C patients who transitioned to SC | | | | | Part D |
|---|---|---|---|---|---|---|
| | (1200 mg + rHuPH20 by initial treatment assignment | | | | | (1200 mg + |
| | Group 1 | Group 2 | Group 3 | Group 4 | Total | rHuPH20) |
| | n = 9 | n = 6 | n = 5 | n = 8 | N = 28 | N = 36 |
| Age, years | | | | | | |
| Mean | 70.7 | 65.3 | 65.2 | 69.3 | 68.1 | 64.6 |
| Median (range) | 71.0 (52-90) | 64.0 (53-80) | 66.0 (60-70) | 69.0 (58-80) | 67.5 (52-90) | 69.0 (24-93) |
| Age category, n (%) | | | | | | |
| <65 | 2 (22.2) | 3 (50.0) | 2 (40.0) | 2 (25.0) | 9 (32.1) | 14 (38.9) |
| ≥65 to < 75 | 4 (44.4) | 1 (16.7) | 3 (60.0) | 4 (50.0) | 12 (42.9) | 17 (47.2) |
| ≥75 | 3 (33.3) | 2 (33.3) | 0 | 2 (25.0) | 7 (25.0) | 5 (13.9) |
| Sex, n (%) | | | | | | |
| Male | 3 (33.3) | 5 (83.3) | 2 (40.0) | 6 (75.0) | 16 (57.1) | 26 (72.2) |
| Female | 6 (66.7) | 1 (16.7) | 3 (60.0) | 2 (25.0) | 12 (42.9) | 10 (27.8) |
| ECOG PS, n (%) | | | | | | |
| 0 | 6 (66.7) | 5 (83.3) | 2 (40.0) | 2 (25.0) | 15 (53.6) | 12 (33.3) |
| 1 | 3 (33.3) | 1 (16.7) | 3 (60.0) | 6 (75.0) | 13 (46.4) | 24 (66.7) |
| Weight, Kg^{a} | | | | | | |
| Mean | 77.1 | 70.2 | 60.6 | 75.9 | 72.3 | 80.4 |
| Median (range) | 72.7 (66-97) | 69.5 (63-78) | 60.0 (50-71) | 73.3 (66-94) | 71.6 (50-97) | 80.7 (48-133) |
| Tumor types, n (%) | | | | | | |
| NSCLC | 3 (33.3) | 0 | 2 (40.0) | 2 (25.0) | 7 (25.0) | 11 (30.6) |
| RCC | 2 (22.2) | 0 | 2 (40.0) | 1 (12.5) | 5 (17.9) | 9 (25.0) |
| MSI-H/dMMR | 2 (22.2) | 3 (50.0) | 1 (20.0) | 2 (25.0) | 8 (28.6) | 7 (19.4) |
| CRC | | | | | | |
| HCC | 1 (11.1) | 3 (50.0) | 0 | 3 (37.5) | 7 (25.0) | 6 (16.7) |
| Melanoma | 1 (11.1) | 0 | 0 | 0 | 1 (3.6) | 3 (8.3) |
| Region, n (%) | | | | | | |
| EU | 1 (11.1) | 5 (83.3) | 3 (60.0) | 6 (75.0) | 15 (53.6) | 14 (38.9) |
| New Zealand | 5 (55.6) | 1 (16.7) | 2 (40.0) | 1 (12.5) | 9 (32.1) | 15 (41.7) |
| South America | 0 | 0 | 0 | 1 (12.5) | 1 (3.6) | 7 (19.4) |
| United States | 3 (33.3) | 0 | 0 | 0 | 3 (10.7) | 0 |
| Lines of prior | | | | | | |
| therapy, n (%) | | | | | | |
| 0 | 2 (22.2) | 0 | 1 (20.0) | 1 (12.5) | 4 (14.3) | 8 (22.2) |
| 1 | 5 (55.6) | 3 (50.0) | 2 (40.0) | 5 (62.5) | 15 (53.6) | 26 (72.2) |
| 2 | 2 (22.2) | 2 (33.3) | 0 | 2 (25.0) | 6 (21.4) | 1 (2.8) |
| ≥3 | 0 | 1 (16.7) | 2 (40.0) | 0 | 3 (10.7) | 1 (2.8) |

[0650] Nivolumab exposures increased with increasing subcutaneous dose (Table 61; FIGS. 8A-8C). For 960 mg and 1200 mg nivolumab+rHuPH20, C_{avg} and Cₜₐᵤ were above geometric mean exposures for IV nivolumab 3 mg/kg every 2 weeks (Q2W), and Cₘₐₓ was below IV nivolumab 10 mg/kg Q2W. In Part C (n=28), 13 (46.4%) patients experienced any-grade TRAEs with no new/worsening grade 3+ TRAEs or TRAEs leading to discontinuation/death; 7 (25.0%) reported grade 1 local site reactions. In Part D (n=36), 27 (75.0%) patients experienced any-grade TRAEs, 4 (11.1%) grade ¾ TRAEs, 2 (5.6%) serious grade ¾ TRAEs with 1 leading to discontinuation, and no treatment-related deaths; 10 (27.8%) reported grade 1 local site reactions. Anti-nivolumab antibodies (Ab) were observed with subcutaneous nivolumab but not associated with altered PK/safety, or neutralizing antibodies. One (4.5%) patient from Part A was considered persistent anti-drug antibody (ADA) positive (Table 62). In Part D, only 1 (3.8%) patient had positive ADA titers of 8 titer units. No neutralizing ADAs were detected, and there was no evidence of altered PK profile with ADA development. There was also no association of anti-nivolumiab antibody development with select AEs (ie, bronchospasm, hypersensitivity, infusion-related reactions). Exploratory biomarker data found increased CD8+ tumor-infiltrating lymphocytes and PD-L1 tumor expression in post-treatment biopsies, similar to IV nivolumab.

TABLE 61
Nivolumab exposures by dose with rHuPH20

| | Geometric mean nivolumab concentration, μg/mL (range) | | | |
|---|---|---|---|---|
| | Cₜₐᵤ | C_{avg} | Cₘₐₓ | Tₘₐₓ |
| Nivolumab 720 mg | 22.2 | 36.6 | 54.8 | 144 |
| subcutaneous (n = 20^{a}) | (4.76-59.6) | (16.5-76.3) | (19.9-114) | (47.0-357) |
| Nivolumab 960 mg | 39.5 | 62.2 | 84.8 | 104 |
| subcutaneous (n = 9) | (8.06-67.6) | (26.8-93.3) | (42.7-128) | (47.2-168) |
| Nivolumab 1200 mg | 51.3 | 77.5 | 105 | 118 |
| subcutaneous (n = 25^{b}) | (18.4-96.5) | (39.1-141) | (40.0-245) | (48.1-192) |

^{a}n = 22 for Cₘₐₓ;
^{b}n = 26 for Cₘₐₓ;
Cₜₐᵤ = concentration at the end of the dosing interval

TABLE 62
NIVO ADA assessments: Parts A, B, and D

| | | | Part B | | | | | |
|---|---|---|---|---|---|---|---|---|
| | Part A | | 720 mg | | | 960 mg | Part D | |
| | 720 mg + | | without | | 960 mg + | without | 1200 mg + | |
| | rHuPH20 | | rHuPH20 | | rHuPH20 | rHuPH20 | rHuPH20 | |
| Patient ADA Status, n (%) | n = 22 | | n = 18 | | n = 10 | n = 17 | n = 26 | |
| Baseline ADA positive^{a} | 2 | (9.1) | 0 | | 2 (20.0) | 0 | 1 | (3.8) |
| ADA positive | 7 | (31.8) | 5 | (27.8) | 3 (30.0) | 0 | 1 | (3.8) |
| Persistent positive | 1 | (4.5) | 0 | | 0 | 0 | 0 | |
| Not persistent positive - | 0 | | 3 | (16.7) | 0 | 0 | 0 | |
| last sample positive | | | | | | | | |
| Other positive | 6 | (27.3) | 2 | (11.1) | 3 (30.0) | 0 | 1 | (3.8) |
| Neutralizing positive | 0 | | 0 | | 0 | 0 | 0 | |
| ADA negative | 15 | (68.2) | 13 | (72.2) | 7 (70.0) | 17 (100.0) | 25 | (96.2) |

[0651] Exposures associated with subcutaneous nivolumab+rHuPH20 doses investigated in the present study were well tolerated, with a safety profile consistent with IV nivolumab. Data support evaluation of subcutaneous nivolumab+rHuPH20 in a phase 3 study.

[0652] Mean duration of subcutaneous nivolumab injection was less than 5 minutes across treatment groups. All patients in Parts C and D received the full subcutaneous dose of nivolumab 1200 mg+rHuPH20 (22,000 U) via single injection.

[0653] Pre- and on-treatment (C1D15) paired biopsies were assessed for CD8 (n=23) expression on tumor-infiltrating lymphocytes (TILs) (FIG. 9A) and tumor PD-L1 (n=25) (FIG. 9B) expression by immunohistochemistry (IHC). Immunohistochemistry results for subcutaneously delivered nivolumab demonstrate a mean change of 5.0% in CD8 TIL expression and 2.8% in PD-L1 tumor expression, suggesting similar pharmacodynamics effects in the tumor microenvironment compared with historical intravenously delivered nivolumab.

### Example 5—Analysis of Oxidative Stress

[0654] In this report, we assess the factors that contribute to increased stability for both Nivolumab and rHuPH20-two very different proteins at very different levels in their stable and active state with one formulation. There were three studies conducted to fully understand the formulation composition impact.

[0655] Study 1—Investigating multiple oxidation stress conditions with regard to different combination of metal, peroxide and light in addition to accelerated stability. Study 2—Investigating the concentration ranges where formulation protection is observed. Study 3—Investigating additional primary packaging components relevant to a pre-filled syringe and wearable device. This study also carefully examined formulation impact with-out rHuPH20.

[0656] To assess the stability of Nivolumab size exclusion chromatography (SEC) was primarily used and to assess the stability of rHuPH20 enzyme activity was measured. PS80 levels and particulates will be measured at select time points. In this report it is shown that addition of DTPA and Met minimizes the risk of oxidation of rHuPH20 and maximizes the stability of Nivolumab.

[0657] Study Design

[0658] Study 1: Stress Conditions

[0659] Study 1 was set-up to determine the effect of different oxidative stresses in combination with each-other. The three oxidation stresses studied were: light [L](1000 lux at room temperature), metal stress [M] (1.5 ppm total, 0.5 ppm each of iron, chromium, and copper) and peroxide [P] (1 mM peroxide). The three stresses were assessed individually and in combination with each other. Preliminary data showed that enzyme activity decreases with RT/RL storage, so the light exposure in combination with other stresses [LP, LM, MPL] was kept to 3 days (3D) at 1000 lux at RT. Note: the light exposure arm of this study [L] is the only condition exposed to 1000 lux at RT for the full duration of the time point. Nivo shows minimal HMW increase under 25° C. exposure so the standard storage condition temperature was increased to 30° C. Due to light combination stress conditions having a 3 day exposure to light at room temperature (RT) all conditions start with either 3 days at RT/Dark or 3 days at 1000 lux at RT. The 8 stress conditions in the study are Light/RT (1000 Lux) [L]; Metal Stress (1.5 ppm iron, chromium and copper) @ RT/Dark 3D+30° C./Dark [M]; 1 mM peroxide @ RT/Dark 3D+30° C./Dark [P]; Light/RT 3D+ Peroxide+30° C./Dark [PL]; Light/RT 3D+ Metal+30° C./Dark [ML]; Peroxide+Metal @ RT/Dark 3D+30° C./Dark [MP]; Light/RT 3D+ Metal+peroxide+30° C./Dark [MPL]; RT/Dark 3D+30° C./Dark [Control].

[0660] The center point formulation composition was: 120 mg/mL Nivo, 20 mM histidine at pH 6.0, 250 mM sucrose, 0.05% w/v polysorbate 80 with 2000 U/mL rHuPH20. In this study the impact of headspace, chelating agent (DTPA/EDTA) and sacrificial oxidizing agent (Met) were studied as shown in Table 63. Table 64 shows the storage conditions and planned time points for this study.

TABLE 63
Study 1- Experimental Conditions
for Oxidation Study of BMS-986298

| | | DTPA | EDTA | Met |
|---|---|---|---|---|
| Formulation | Headspace | (μM) | (μM) | (mM) |
| 1 | Air | 50 | 0 | 5.0 |
| 2 | Air | 0 | 0 | 0.0 |
| 3 | Air | 0 | 0 | 5.0 |
| 4 | Air | 50 | 0 | 0 |
| 5 | Air | 0 | 100 | 5.0 |
| 6 | Nitrogen | 50 | 0 | 5.0 |
| 7 | Nitrogen | 0 | 0 | 0 |

(Present in all formulations equally are 120 mg/mL BMS-986298 in 20 mM histidine at pH 6.0, 250 mM sucrose. 0.05% (w/v) polysorbate 80, and 2,000 U/mL rHuPH20)

TABLE 64
Study 1- Oxidation Study Time Points

| | | 3 | 14 | 1 | 3 |
|---|---|---|---|---|---|
| Temperature | T0 | days | days | month | months |
| Light [L] | abcd | X | ab | ac | ac |
| (1000 Lux @ RT) | | | | | |
| Metal [M] | | X | ab | a | a |
| (3 D RT/Dart + 30° C./Dark) | | | | | |
| Peroxide [P] | | X | ab | a | a |
| (3 D RT/Dart + 30° C./Dark) | | | | | |
| Light + Peroxide [PL] | | X | ab | a | a |
| (3 D RT/RL + 30° C./Dark) | | | | | |
| Light + Metal [ML] | | X | ab | a | a |
| (3 D RT/RL + 30° C./Dark) | | | | | |
| Metal + Peroxide [MP] | | X | ab | a | a |
| (3 D RT/Dart + 30° C./Dark) | | | | | |
| Metal + Peroxide + Light | | X | abc | acd | ac |
| [MPL] | | | | | |
| (3 D RT/RL + 30° C./Dark) | | | | | |
| Control [RT30] | | X | ab | ac | ac |
| (3 D RT/Dark + 30° C.) | | | | | |

X pulled but not tested. Sample analysis defined in Table 65

[0661] In this report, we focused on how different parameters affect stability of Nivolumab (Nivo) by size exclusion chromatography (SEC). Evaluation of the stability of rHuPH20 was conducted only at selected time points due to low throughput of the method. In addition select samples were chosen for evaluation of the stability of PS80—a key excipient added to provide stability of the drug product. These results were used to predict how the selected conditions affect both stability of Nivo and rHuPH20 under different oxidation stress conditions.

TABLE 65
Study 1-Analysis Volumes

| Code | Measurement | Volume (mL) |
|---|---|---|
| a | Appearance | 0.6 |
| | SEC | 0.1 |
| b | MFI* | 1.1 |
| c | Enzyme Activity* | 0.2 |
| d | PS80* | 0.1 |

*performed for select samples

[0662] Study 2: Formulation Composition Variation

[0663] Study 2 was set-up to determine the ranges where the benefits of the formulation composition are observed. Study 1 defined the condition to include from an oxidation stress perspective to be MPL and RT/RL. These two stress conditions along with a control were studied for oxidation stress. Formulation conditions expected to have oxidation benefits were studied under both oxidation and thermal stress (5, 25, and 35° C.) conditions. All formulations were studied using thermal stress conditions to assess stability.

[0664] Oxidation Stress Conditions:
[0665] MPL: Combination of all three stresses: 3 days at room temperature/room light [L](1000 lux), with spiked metal [M] (1.5 ppm total, 0.5 ppm each of iron, chromium, and copper) and spiked peroxide [P] (1 mM peroxide). Metal and peroxide are spiked at TO (initial time point). After the 3 days at room temperature/room light samples are moved and stored at 30° C./protected from light for the remainder of that time point.
[0666] RT30: Control to the MPL stress condition. Room temperature/dark for 3 days followed by 30° C./protected from light for the remainder of that time point
[0667] RT/RL: Room temperature/room light (1000 lux) for the full duration of the study.

[0668] Thermal Stress conditions included (i) 5° C./protected from light; (ii) 25° C./protected from light (also used as a control to the RT/RL condition); and (iii) 35° C./protected from light.

[0669] Formulations were selected to show that the formulation is stable across the following formulation compositions: (i) pH: 5.2-6.8 His; (ii) Histidine: 10-100 mM (Alt: Succinate); (iii) DTPA 10-200 μM (Alt: 100 μM EDTA); (iv) Met: 1-20 mM (Alt: 10 mM Trp); (v) rHuPH20: 0-5,000 U/mL; (vi) PS80: 0.01-0.1% w/v (Alt: PS20 0.05% w/v and Poloxamer 0.2 mg/mL); (vii) Sugar: 10-400 mM sucrose (Alt: 10% sorbitol and trehalose); and (viii) Protein: 100-175 mg/mL. For all these conditions the center point formulation composition was: 120 mg/mL Nivo, 20 mM histidine at pH 6.0, 250 mM sucrose, 50 μM DTPA, 5 mM Met, 0.05% polysorbate 80 with 2,000 U/mL rHuPH20 and tested in a vial.

[0670] Conditions that were studied for both thermal and oxidation stress conditions are shown in Table 66. Note there are duplicate independent formulation preparations in the design for the center point condition and the condition with 50 μM DTPA and no Met. The screen included a small excipient characterization DOE investigating if there are any combined effects between pH, DTPA, and Met concentration. Variations in DTPA, Met, and enzyme levels, in addition to having a nitrogen head space was studied under these conditions where oxidation is more likely to be impacted by these formulation changes. Alternate excipients were added to understand how they behave relative to the proposed excipient. As an alternate to Met Trp was added and as an alternate to DTPA, EDTA was studied. Higher levels of these alternate excipients were studied to ensure there is no question about the performance of the alternate excipient relative to the proposed excipient. Independent replicates for select formulations are included in the study (formulation 21 and 29 with DTPA only and formulation 15 and 28—center point).

[0671] Formulation conditions that have been investigated for thermal stress alone are listed in Table 67. Factors that are less likely to impact oxidation were varied here. These factors were: protein concentration, use of an alternate buffer and buffer strength, alternate sugar and sugar concentration, and alternate surfactant and varied surfactant levels. Extremes of the buffer pH were also studied here. For all these conditions the formulation included 50 μM DTPA, 5 mM Met with 2,000 U/mL rHuPH20.

[0672] The stress and time points corresponding to the oxidation stress conditions are tabulated in Table 68. The time points corresponding to the thermal stress condition are tabulated in Table 69.

TABLE 66
Study 2- Experimental Conditions for Oxidation
and Thermal Stress of BMS-986298

| | | DTPA | Met | rHuPH20 | |
|---|---|---|---|---|---|
| Formulation | pH | (uM) | (mM) | (U/mL) | Headspace |
| 1 | 5.5 | 10 | 1 | 2000 | Air |
| 2 | 5.5 | 10 | 10 | 2000 | Air |
| 3 | 5.5 | 100 | 1 | 2000 | Air |
| 4 | 5.5 | 100 | 10 | 2000 | Air |
| 5 | 6.5 | 10 | 1 | 2000 | Air |
| 6 | 6.5 | 10 | 10 | 2000 | Air |
| 7 | 6.5 | 100 | 1 | 2000 | Air |
| 8 | 6.5 | 100 | 10 | 2000 | Air |
| 9 | 5.5 | 50 | 5 | 2000 | Air |
| 10 | 6.5 | 50 | 5 | 2000 | Air |
| 11 | 6 | 10 | 5 | 2000 | Air |
| 12 | 6 | 100 | 5 | 2000 | Air |
| 13 | 6 | 50 | 1 | 2000 | Air |
| 14 | 6 | 50 | 10 | 2000 | Air |
| 15* | 6 | 50 | 5 | 2000 | Air |
| 16 | 6 | 0 | 0 | 2000 | Air |
| 17 | 6 | 200 | 5 | 2000 | Air |
| 18 | 6 | 100 - EDTA | 0 | 2000 | Air |
| 19 | 6 | 100 - EDTA | 5 | 2000 | Air |
| 20 | 6 | 0 | 5 | 2000 | Air |
| 21* | 6 | 50 | 0 | 2000 | Air |
| 22 | 6 | 50 | 5 | 2000 | Nitrogen |
| 23 | 6 | 0 | 0 | 2000 | Nitrogen |
| 24 | 6 | 50 | 5 | 0 | Air |
| 25 | 6 | 50 | 5 | 500 | Air |
| 26 | 6 | 50 | 5 | 5000 | Air |
| 27 | 6 | 50 | Trp | 2000 | Air |
| | | | (10 mM) | | |
| 28* | 6 | 50 | 5 | 2000 | Air |
| 29* | 6 | 50 | 0 | 2000 | Air |
| 30 | 6 | 50 | 20 | 2000 | Air |

*duplicate independent formulations preparations.
(Present in all formulations equally are 120 mg/mL BMS-986298 in 20 mM histidine, 250 mM sucrose, and 0.05% (w/v) polysorbate 80)

TABLE 67
Study 2- Experimental Conditions for Thermal Stress only for BMS-986298

| | Protein Conc | | | Buffer | | Sugar | PS80 |
|---|---|---|---|---|---|---|---|
| Formulation | (mg/mL) | pH | Buffer | (mM) | Sugar | (mM) | (wt %) |
| 31 | 100 | 6.0 | his | 20 | Sucrose | 250 | 0.05 |
| 32 | 175 | 6.0 | his | 20 | Sucrose | 250 | 0.05 |
| 33 | 120 | 5.2 | his | 20 | Sucrose | 250 | 0.05 |
| 34 | 120 | 6.8 | his | 20 | Sucrose | 250 | 0.05 |
| 35 | 120 | 6.0 | his | 10 | Sucrose | 250 | 0.05 |
| 36 | 120 | 6.0 | his | 50 | Sucrose | 250 | 0.05 |
| 37 | 120 | 6.0 | his | 100 | Sucrose | 250 | 0.05 |
| 38† | 120 | 6.0 | his | 20 | sugar free | 0 | 0.05 |
| 39† | 120 | 6.0 | his | 20 | Sucrose | 10 | 0.05 |
| 40† | 120 | 6.0 | his | 20 | Sucrose | 400 | 0.05 |
| 41 | 120 | 6.0 | his | 20 | Sucrose | 250 | 0.05 - PS20 |
| 42 | 120 | 6.0 | his | 20 | Sucrose | 250 | Poloxamer - |
| | | | | | | | 0.2 mg/mL |
| 43†† | 120 | 6.0 | his | 20 | Sorbitol | 10% | 0.05 |
| 44†† | 120 | 6.0 | his | 20 | Trehalose | 10% | 0.05 |
| 45 | 120 | 6.0 | succinate | 20 | Sucrose | 250 | 0.05 |
| 46 | 120 | 6 | his | 20 | Sucrose | 250 | 0 |
| 47 | 120 | 6 | his | 20 | Sucrose | 250 | 0.01 |
| 48 | 120 | 6 | his | 20 | Sucrose | 250 | 0.1 |
| 49†* | 120 | 6 | his | 20 | Sucrose | 250 | 0.05 |

*Duplicate independent formulation preparations to formulation 15 and 28 in Table 66 above (also tested for thermal stress). This formulation also confirms comparable performance of the two DS sources.
†Formulated using a different DS source without sugar.
‡ for this formulation it was later discovered that the sugars were not added. These results were omitted here but these two sugars were covered in study 3.
(Present in all formulations equally are 50 μM DTPA, 5 mM Met with 2,000 U/mL rHuPH20)

TABLE 68
Study 2-Oxidation Study Time Points

| | | Light (3 D) 25° C. + | |
|---|---|---|---|
| | Light 25° C./ | Metal + peroxide + | 25 C./Dark (3 D) + |
| Temper- | 1000 Lux@ RT | 30° C./Dark | 30° C./Dark |
| ature | [25RT] | [MPL] | [RT30] |
| T0 | abcde | — | — |
| 2 W | a* | a* | a* |
| 1 M | a | a | a |
| 3 M | — | acde | a |

Sample analysis defined in Table 70.
Note.
1 M and 3 M samples for MFI where planned but could not be run due to staffing constraints during COVID.
*Optional testing

TABLE 69
Study 2-Thermal Study Time Points

| Temperature | 5° C. | 25° C. | 35° C. |
|---|---|---|---|
| T0 | abcde | — | — |
| 2 W | — | a* | a* |
| 1 M | — | a | a |
| 3 M | a | a | acde |
| 6 M | a | a | a |

Sample analysis defined in Table 70.
Note.
6 M samples for MFI where planned but could not be run due to staffing constraints during COVID.
*Optional testing

[0673] In this study, we focused on how different parameters affect stability of BMS-986298 or Nivolumab primarily by size exclusion chromatography (SEC). Evaluation of the stability of rHuPH20 was performed only at selected time points, due to the low throughput of the enzyme activity method. In addition, select samples were chosen to evaluate the stability of PS80-a key excipient added to provide stability of the drug product. CE-SDS and iCE were tested on select samples to understand formation of low molecular weight species and charge variants. These results were used to predict how the selected conditions affect both stability of Nivo and rHuPH20 under different oxidation stress conditions.

TABLE 70
Study 2-Analysis Volumes

| Code | Measurement | Volume (mL) |
|---|---|---|
| a | Appearance | 0.5 |
| | SEC | 0.1 |
| b | MFI* | 1.1 |
| c | Enzyme Activity* | 0.2 |
| d | PS80* | 0.1 |
| e | CE-SDS* | 0.1* |
| | iCIEF* | |

*run for select samples

[0674] Study 3: Formulation Composition Variation of PFS and Wearable Devices

[0675] Study 3 was set-up similar to Study 2 but had conditions focused on the use of the pre-filled syringe and wearable devices. Similar to Study 2, the worst-case condition from Study 1 (MPL) was included from an oxidation stress condition. The room temperature/room light condition was taken out, since it is unlikely to be encountered in real life, and the high stress it imparts on both protein and enzyme. Similar to Study 2 the standard thermal stress conditions were studied in addition to oxidation stress. Formulation conditions likely to impact oxidation were studied for both oxidation and thermal stress conditions. All formulations were tested under standard thermal stability conditions.

[0676] Oxidation Stress Conditions Included:
[0677] MPL: Combination of all three stresses: 3 days at room temperature/room light [L](1000 lux), with spiked metal [M] (1.5 ppm total, 0.5 ppm each of iron, chromium, and copper) and spiked peroxide [P] (1 mM Peroxide). Metal and peroxide are spiked at TO (initial time point). After the 3 days at room temperature/room light samples are moved and stored at 30° C./protected from light for the remainder of that time point.
[0678] RT30: Control to the MPL stress condition. Room temperature/dark for 3 days followed by 30° C./protected from light for the remainder of that time point.

[0679] Thermal Stress conditions included (i) 5° C./protected from light; (ii) 25° C./protected from light; and (iii) 35° C./protected from light.

[0680] Using the data from Study 2 the formulation concentration ranges that was desired to investigate was narrowed to try to find the optimum range for stabilization. Formulations were selected to show that the formulation is stable across these formulation compositions: (i) pH: 5.2-6.5 His; (ii) Histidine: 15-100 mM; (iii) DTPA 10-200 μM (Alt: 100 μM EDTA); (iv) Met: 1-20 mM (Alt: 10 mM Trp); (v) rHuPH20:0-10,000 U/mL; (vi) PS80: 0.01-0.1% w/v (Alt: PS20 and Poloxamer 0.2 mg/mL); (vii) Sugar: 10-400 mM sucrose (Alt: 10% sorbitol and trehalose); (viii) Protein: 100-200 mg/mL; and (ix) Vial and PFS and Patch pump.

[0681] For all these conditions the center point formulation composition was: 20 mM histidine at pH 6.0, 250 mM sucrose, 50 μM DTPA, 5 mM Met, 0.05% w/v polysorbate 80 with 2,000 U/mL rHuPH20. The protein concentration for samples in the vial was at 120 mg/mL. Samples in the PFS had a nivolumab protein concentration of 150 mg/mL. This study included multiple conditions studied in study 2 but with no enzyme. Minimal impact due to enzyme is expected so a confirmatory study was done and with one-off conditions tested at the center point.

[0682] Conditions that were studied for both thermal and oxidation stress and oxidation stress conditions are shown in Table 71. Conditions added to cover PFS were included here as well as conditions that pertain to the use of a PFS (silicone oil and tungsten spike). DTPA, Met, and enzyme levels were also studied here where oxidation is more likely to be impacted by these formulation composition differences.

[0683] Formulation conditions that have been investigated for thermal stress alone are listed in Table 72. Factors that are less likely to impact oxidation were varied here. These factors were: protein concentration, buffer strength, and enzyme levels. For all these conditions the formulation included 50 μM DTPA and 5 mM Met.

[0684] The stress and time points corresponding to the oxidation stress conditions are tabulated in Table 73. The time points corresponding to the thermal stress condition are tabulated in Table 74.

TABLE 71
Study 3- Experimental Conditions for Oxidation
and Thermal Stress of BMS-986298

| | BMS- | | | | |
|---|---|---|---|---|---|
| Formu- | 986298 | DTPA | Met | rHPH20 | |
| lation | (mg/mL) | (uM) | (mM) | (U/mL) | Notes |
| 1 | 150 | 50 | 5 | 2000 | Silicone oil - 2X PFS |
| 2 | 120 | 50 | 5 | 2000 | PFS |
| 3 | 150 | 50 | 5 | 2000 | PFS |
| 4 | 165 | 50 | 5 | 2000 | PFS |
| 5 | 120 | 50 | 5 | 2000 | center point connectivity |
| | | | | | to study 2 |
| 6 | 150 | 50 | 5 | 2000 | Tungsten 1.0 ppm spike |
| 7 | 120 | 50 | 5 | 10,000 | |
| 10 | 120 | 50 | 5 | 0 | N = 1 |
| 11 | 120 | 50 | 5 | 0 | N = 2 |
| 12 | 120 | 50 | 0 | 0 | N = 1 |
| 13 | 120 | 50 | 0 | 0 | N = 2 |
| 14 | 120 | 0 | 0 | 0 | |
| 15 | 120 | 0 | 5 | 0 | |
| 16 | 120 | 10 | 5 | 0 | |
| 17 | 120 | 200 | 5 | 0 | |
| 18 | 120 | 50 | 1 | 0 | |
| 19 | 120 | 50 | 20 | 0 | |
| 20 | 120 | EDTA | 5 | 0 | |
| | | (100) | | | |
| 21 | 120 | 50 | Trp | 0 | Trp (10) |
| | | | (10) | | |
| 22 | 150 | 50 | 5 | 0 | Tungsten 1.0 ppm spike |
| 38 | 150 | 50 | 5 | 0 | Silicone oil -2X |
| 39 | 120 | 50 | 5 | 0 | PFS |
| 40 | 150 | 50 | 5 | 0 | PFS |
| 41 | 165 | 50 | 5 | 0 | PFS |
| 42 | 200 | 50 | 5 | 0 | PFS |
| 43 | 200 | 50 | 5 | 2000 | PFS |
| 44 | 120 | 50 | 5 | 2000 | patch pump |
| 45 | 120 | 50 | 5 | 0 | patch pump |
| 46 | 120 | 50 | 5 | 2000 | patch pump control |

Present in all formulations equally are 20 mM histidine pH 6.0, 250 mM sucrose, and 0.05% (w/v) polysorbate 80.

TABLE 72
Study 3- Experimental Conditions for Thermal Stress only for BMS-986298

| | Protein | | | | | | |
|---|---|---|---|---|---|---|---|
| | Conc | | | Buffer | Sugar | PS80 | rHuPH20 |
| Formulation | (mg/mL) | pH | Buffer | (mM) | (mM) | (wt %) | (U/mL) |
| 8 | 200 | 6 | Histidine | 20 | 250 | 0.05 | 2000 |
| 9 | 120 | 6 | Histidine | 15 | 250 | 0.05 | 2000 |
| 23 | 120 | 5.2 | Histidine | 20 | 250 | 0.05 | 0 |
| 24 | 120 | 6.5 | Histidine | 20 | 250 | 0.05 | 0 |
| 25 | 120 | 6.0 | Succinate | 20 | 250 | 0.05 | 0 |
| 26 | 120 | 6 | Histidine | 20 | Sorbitol (10%) | 0.05 | 0 |
| 27 | 120 | 6 | Histidine | 20 | 10 | 0.05 | 0 |
| 28 | 120 | 6 | Histidine | 20 | 400 | 0.05 | 0 |
| 29 | 120 | 6 | Histidine | 20 | Trehalose(10%) | 0.05 | 0 |
| 30 | 120 | 6 | Histidine | 20 | 250 | 0.01 | 0 |
| 31 | 120 | 6 | Histidine | 20 | 250 | 0.1 | 0 |
| 32 | 120 | 6 | Histidine | 20 | 250 | 0.05 | 0 |
| | | | | | | (PS-20) | |
| 33 | 120 | 6 | Histidine | 20 | 250 | Poloxamer | 0 |
| | | | | | | (0.2 mg/mL) | |
| 34 | 120 | 6 | Histidine | 15 | 250 | 0.05 | 0 |
| 35 | 120 | 6 | Histidine | 100 | 250 | 0.05 | 0 |
| 36 | 100 | 6 | Histidine | 20 | 250 | 0.05 | 0 |
| 37 | 200 | 6 | Histidine | 20 | 250 | 0.05 | 0 |

(Present in all formulations equally are 50 uM DTPA and 2 mM Met. All filled in vials)

TABLE 73
Study 3-Oxidation Study Time Points

Temperature

| | Light (3 D) 25° C. + Metal + | 25 C./Dark (3 D) + |
|---|---|---|
| | peroxide + 30° C./Dark | 30° C./Dark |
| | [MPL] | [RT30] |
| T0 | — | — |
| 2 W | a* | a* |
| 1 M | a | a |
| 3 M | abcde | ab |

Sample analysis defined in Table 75.
*Optional testing.

TABLE 74
Study 3-Thermal Study Time Points

| Temperature | 5° C. | 25° C. | 35° C. |
|---|---|---|---|
| T0 | ab | — | — |
| 2 W | — | a* | a* |
| 1 M | — | a | a |
| 3 M | a | a | a |
| 6 M | ab | ab | a |

Sample analysis defined in Table 75.
*Optional testing.

[0685] In this study, we focused on how different parameters affect stability of BMS-986298 or Nivo primarily by size exclusion chromatography (SEC). Confirmatory MFI samples are run only for the 5 and 25° C. 6M samples.

TABLE 75
Study 3-Analysis Volumes

| Code | Measurement | Volume (mL) |
|---|---|---|
| a | Appearance | 0.5 |
| | SEC | 0.1 |
| b | MFI* | 1.1 |

*run for select samples

[0686] Materials and Methods

[0687] Materials

[0688] Details for materials used in the studies are provided in Table 76.

TABLE 76
Material Information

| | | Study 1 | Study 2 | Study 3 |
|---|---|---|---|---|
| | Material Number | Lot Number | Lot Number | Lot Number |
| Nivo DS (170 mg/mL) | 1274255 | A1A8A-036 | | ABP4182-01 |
| Nivo DS -sugar free | N/A | VF Pool CRU | | VF Pool CRU |
| (10 mg/mL) | | 20 Aug. 2018 | | 20 Aug. 2018 |
| rHuPH20 (10 mg/mL) | 1405640 | 104-003-16- | 2HUN1803CA | 2HUN1803CA |
| | | 290016S | | |
| Neopack 2.25 mL | RFS 27G1/25BSTW | — | | 6299337 |
| Syringes | RNSBD260HS | | | |
| 2X Si syringes | Pilot 0T002 Fleming SCF | — | | 18B331YL . . . 0204 |
| Vial | 1325008 | AAK2742 | | AAR0679 |
| Stoppers | 1292715 | AAL9676 | | AAL9676 |
| Crimps | 1221911 | AAC2886 | | 3K78805 |
| Patch pump-Smart | West: 26018026 | — | | SC00013392 |
| Dose 10 mL | | | | |
| Patch Pump Stopper | D 21-7HW SD2 10 mL | — | | 905004 |
| | piston FR2RUV | | | |
| Patch Pump West | 26017493 | — | | SC00004318 |
| cartridge | | | | |
| Histidine | 1274255 | AAM9761 | | ABJ4908 |
| His HCl H2O | 1275346 | AAM9523 | | ABJ5012 |
| Sucrose | 1244359 | AAS9949 | | AAX0304 |
| PS80 | 1353220 | ABE4589 | | NOF 707361Z2 |
| DTPA | 05GD11.HQ00003 | LG16.360 | | ABT3852 |
| EDTA | 1372205 (Hovione) | AAL6226 | | AAN9782 |
| Methionine | M9625-1KG (Sigma- | SLBZ1683 | | SLBZ1683 |
| | Aldrich) | | | |
| Peroxide | BDH7690-1 (VWR) | 18C065005 | | 18C065005 |
| Chromium(III)Chloride | 27096-1000G-F | BCBC0518V | | BCBC0518V |
| hexahydrate | (Sigma-Aldrich) | | | |
| Copper (II) Nitrate | 61194 (Fluka) | 1272598 | 42807279 | — |
| trihydrate | | | | |

| | | | |
|---|---|---|---|
| Copper(II) Chloride, | #12457 (Alfa Aesar) | — | A28Q06 |
| anhydrous, 98% | | | |
| Ammonium Iron (II) | 13448 (Alfa Aesar) | J23N13 | J23N13 |
| sulfate | | | |

[0689] Sample Preparation

[0690] Thaw

[0691] Drug substance (DS) BMS-986298 and rHuPH20 are stored frozen. These DS bottles were thawed at room temperature protected from light. Once thawed the DS bottles were gently mixed to ensure homogeneity. The DS was stored at 5° C. until use and any remaining portion was re-frozen after the use. DS used in the formulation studies are all DTPA and PS80 free.

[0692] For the Study 1 formulation, the DP samples were prepared using bulk DS material BMS-986298 (at 170 mg/mL) by adding the following stock solutions: (i) 10 mg/mL rHuPH20 DS (112 kU/mg rHuPh20); (ii) 5% Polysorbate 80 (100×); (iii) 2.5 mM DTPA (50×); (iv) 5 mM EDTA (50×); (v) 250 mM Methionine (50×); (vi) 20 mM Histidine 250 mM Sucrose pH 6.0; (vii) 50 mM hydrogen peroxide (50×); (viii) 50 ppm Chromium(III)Chloride hexahydrate, 50 ppm Copper (II) Nitrate trihydrate, and 50 ppm Ammonium Iron (II) sulfate (100×). The DS starting composition comprised 20 mM Histidine, and 250 mM Sucrose, at pH 6.0.

[0693] For each formulation a sample was prepared with no spike, spiked with peroxide only, metal only, and metal and peroxide. Metal cocktail was prepared immediately before spiking. All formulations were filtered using an Acrodisc syringe filter with 0.2 μm Supor membrane after gentle mixing. Experiments are documented in notebook A0F7F-090.

[0694] For the Study 2 formulation, the DP samples were prepared by 4 methods. First, by direct addition using bulk DS material BMS-986298 (at 170 mg/mL) with no further preparation—no buffer exchange. Formulated by adding 0.2 μm filtered stock solutions to target concentration. Stock solutions included: 2 M Sucrose; 495 mM Histidine pH 6.0; 500 mM Histidine pH 5.2; 500 mM Histidine pH 5.5; 211 mM Histidine pH 6.5; 262.5 mM Histidine pH 6.8; 5% PS80; 5 mM EDTA; 2.5 mM DTPA; 250 mM Met; 5% PS80; 20 mg/mL Poloxamer; 1400 mM Succinate; 80% Sorbitol; 40% Trehalose; 54 mM Tryptophan; and Water.

[0695] This approach was taken for formulation compositions where the DS pH was 6.0 with sucrose at 250 mM level. DS starting composition was: 20 mM Histidine, 250 mM Sucrose, pH 6.0.

[0696] CM3: Buffer was exchanged using automation equipment where a 10 kDa filter was used with pressure to concentrate and addition of target buffer to the target buffer exchange composition. Two input DS streams were used: (i) DS at 170 mg/mL Nivo stock (this was used directly as-is; DS starting composition is: 20 mM Histidine, 250 mM Sucrose, pH 6.0); and (ii) DS at 10 mg/mL Nivo stock (this material is harvested during the viral filtration step prior to the addition of sugars; samples where sugar composition is varied was used this DS stock; appropriate sugars were added to the DS to the target composition then concentrated using a centricon filter; a 30 kDa filter was used for the concentration).

[0697] The formulations where this type of buffer exchange was needed had small sample requirement (used for only 1 formulation with a unique pH or sugar level was needed). After buffer exchange same stocks that are used to formulate as noted above. Tangential flow filtration (TFF) using a 30 kDa filter with 8 diavolumes of buffer exchange. Two TFFs were run one with pH 5.5 and one at pH 6.5. This was needed due to the number of formulations at these two pH values. After buffer exchange same stocks that are used to formulate as in step 1 above. Dialysis was used to prepare formulation 38-a sugar free formulation. The solution was a sugar free formulation initially and was then buffer exchanged to the target buffer pH/composition. The concentration was adjusted subsequently by centrifugation through a 10 kDa membrane. After buffer exchange, the same stocks were used to formulate as in step 1 above.

[0698] For MPL conditions metal was spiked by creating a stock solution of 50 ppm chromium(III) chloride hexahydrate, 50 ppm copper (II) nitrate trihydrate, and 50 ppm ammonium iron (II) sulfate. Similarly a 50 mM hydrogen peroxide solution was made to spike in peroxide.

[0699] All formulations were filtered using an Acrodisc syringe filter with 0.2 μm Supor membrane after gentle mixing.

[0700] Excipient analysis was run on the TFF buffers to confirm excipient levels. The analysis found that the CM3 buffer exchange with sorbitol did not have sorbitol added and trehalose was also inadvertently missed. Due to this the results from these two samples (formulation 43 and 44) are omitted from the analysis. These conditions are included in Study 3 but with-out enzyme.

[0701] For the Study 3 formulation, the DP samples were prepared by direct addition, buffer exchange by the CM3, or buffer exchanged with TFF. The preparation methods mirror that of study 2. The main differences between study 2 and 3 was that the DS stock is a different lot of material and one of the metals used for spiking for study 3 was copper(II) chloride vs. in study 2 was copper (II) nitrate trihydrate.

[0702] Patch pump cartridges were filled using a needle and placed on stability along with the vials and syringes. Samples were pulled at the appropriate pull time and frozen until the Smart Dose patch pumps arrived. The patch pump was used to deliver the solution from the cartridge. The liquid was removed for the control samples using a needle.

[0703] Fill

[0704] Formulated and filtered DP was filled into depyrogenated 3-cc vials (Schott Type 1 glass) or BD Neopack 2.25 mL syringes and stoppered with autoclaved 13-mm Daikyo stoppers (D-21-7S, Fluorotec-coated serum) or BD1-3 mL plunger stoppers. Vials were crimped and placed on stability upright in a vertical position. The exception to that is when exposed to light where the vials are placed horizontally. Syringes were stored in a horizontal position.

[0705] Analysis

[0706] Samples were pulled and then immediately frozen until time of analysis with the exception of particulate analysis (MFI); which was held at 5° C. until analysis.

[0707] SEC

[0708] DP samples were analyzed by SEC-HPLC (MTD-10789) for quantitative analysis of HMW and LMW species. Samples were analyzed using a TSK gel Super SW 3000 column (TOSOH 1875) with a flow rate of 0.5 mL/min and a run time of 35 min. Mobile phase was 100 mM phosphate and 100 mM sodium sulfate pH 6.8. A load of 50 μg of Nivo sample was injected for each run. The peaks were detected by UV-absorbance at 280 nm, and the area and retention time were measured for each peak. The area percentage for the monomer, HMW, and LMW species were calculated and reported.

[0709] Enzyme Activity

[0710] rHuPH20 activity was measured using a plate-based turbidity assay, method CTL-10028 in DCA. The hyaluronidase potency assay is based on the formation of an insoluble precipitate when hyaluronic acid (HA) binds with acidified serum. The precipitate results in a turbid solution that can be measured at 640 nm. Potency (or activity) of hyaluronidase is directly measured by incubating the enzyme with HA substrate for 30 minutes, precipitating out the undigested HA with acidified serum, and comparing the turbidity against a reference standard curve. PS80 Analysis

[0711] PS80 levels were measured using a Waters Oasis Max column at a flow rate of 1 mL/minute with 0.1% formic acid with 5 mM ammonium formate/0.1% formic acid in acetonitrile at 30° C. with a mass spectrometer.

[0712] Particulates

[0713] Particulate levels were tested using Micro flow imaging (MFI). 1.1 mL of each sample were filled into separate glass vials for MFI analysis. Samples were tested with a water sample run between analysis. Sample is tested with 0.15 mL purge and 0.43 mL analysis volume.

[0714] Charge Variants by Imaged Capillary Isoelectric Focusing (iCIEF)

[0715] Charge variants were analyzed by iCIEF using an imaged isoelectric focusing system, known as iCE3 (MTD-10788). Samples mixed with appropriate pI markers, ampholytes and other additives were injected by an auto-sampler into a fluorocarbon (FC) coated capillary cartridge. After high voltage of pre-focusing and focusing, sample migration was captured by a UV detector, and UV light absorption images were taken by a CCD camera. The area percentages for the main peak, acidic variants, and basic variants were calculated and reported.

[0716] CE-SDS

[0717] Relative percent purity of Nivo was determined by CE-SDS using the LabChip GX II Caliper system under non-reducing conditions. The samples were denatured and prepared in the presence of sodium dodecyl sulfate (SDS), a detergent that coats the protein providing a negative charge effectively masking its native charge. Each sample was aspirated onto the chip, mixed with a dye and electrophoretically separated. A separate de-staining step was then performed on the chip. Optics within the instrument detected the florescent signal for each sample. Protein species were separated based on size and electrophoretic mobility. Relative percent area was calculated for each peak and relative percent purity (% main peak) was reported.

[0718] Results—Study 1

[0719] Size Exclusion Chromatography

[0720] Size exclusion chromatography was the primary tool used to monitor the stability of Nivolumab under the various stress conditions studied.

[0721] To investigate the impact of nitrogen head space, two formulations with nitrogen headspace were investigated. A formulation with both 50 μm DTPA and 5 mM Met (Formulation 1-Air, Formulation 6-Nitrogen) and a formulation without DTPA nor Met (Formulation 2—Air, Formulation 7-Nitrogen). The HMW change is plotted in FIG. 10. For the formulation with both DTPA and Met the headspace impact is minimal for all conditions other than the RT/Light condition with continuous light exposure (FIG. 10). In the formulations with no DTPA and no met there is a benefit in having a nitrogen headspace (FIG. 10). With the addition of both DTPA and Met, the oxidation is well controlled and thus a nitrogen headspace is unnecessary.

[0722] The impact of the various formulations on HMW species formation of Nivo after exposure to various stress conditions are shown in FIG. 11. The stress conditions include (from left to right): 1.) a control-exposure to 3 days at room temperature/dark (control for 3 days light exposure for L conditions)+30° C. thermal stress (thermal stress for all conditions other than the RT/Light); 2.) metal—0.5 ppm each of iron, chromium, and copper (M condition)+light (3 days at 1000 lux at room temperature—L condition)+30° C. thermal stress; 3.) M+1 mM peroxide (P condition)+L+30° C. thermal stress; 4.) M+L+30° C. thermal stress; 5.) M+30° C. thermal stress; 6.) P+L+30° C. thermal stress; 7.) P+30° C. thermal stress; 8.) Room temperature/room light (no extra thermal stress).

[0723] Across all stress conditions formulation 2: with no DTPA and no Met had the highest rate of HMW formation, followed by formulation 3: with no DTPA and 5 mM Met. Formulation 5: with 100 mM EDTA and 5 mM Met followed by Formulation 4: 50 μM DTPA with no Met. The best formulation was Formulation 1 with both 50 μm DTPA and 5 mM Met. This behavior is observed across all stress conditions but the differences are best observed by looking at the MPL (combined stress condition with thermal stress of 30° C.). The plot of this MPL stress condition against all formulation conditions is shown in FIG. 12.

[0724] Careful examination of the MPL stress condition in FIG. 12 shows the benefit of having both 50 μM DTPA and 5 mM Met (formulation 1-air and 6-nitrogen). Having both anti-oxidants in the formulation stabilizes Nivo such that exchanging the headspace with nitrogen does not show an improved stabilization (formulation 1 overlays completely with 6). Having DTPA alone (Formulation 4: 50 μM DTPA with 0 mM Met) outperforms higher amounts of EDTA with Met (Formulation 5: 100 μM EDTA with 5 mM Met). The highest HMW formation is observed with no DTPA and no Met under air headspace (Formulation 2: 0 μM DTPA with 0 mM Met) followed by the same formulation but under nitrogen headspace (Formulation 7) and having Met alone (Formulation 3: 0 μM DTPA with 5 mM Met).

[0725] Another way to examine these data is by looking at the formulation compositions and how they perform by stress condition as shown in FIG. 13. The benefits of having both DTPA and Met can be observed. Ibis way of examining the data shows that the RT/Light condition to be the worst case and from an individual stress perspective 3 days light and/or metal results in the highest % HMW formation and the effect of peroxide is muted. The benefit of a nitrogen headspace is very apparent for the RT/Light condition. For the no DTPA, no Met samples nitrogen headspace decreases % HMW by approximately 0.5% across all stress conditions. No significant improvement due to nitrogen headspace is observed for the formulations with both DTPA and Met. % HMW for 100 μM EDTA with 5 mM Met is greater than 50 μM DTPA with 5 mM Met but the size of the effect could be dependent on the precise stressor.

[0726] To provide a statistical assessment various linear models were explored. The absence of an estimate for pure error, design imbalance, and complicated formulation-stress dynamics obviated attempts at a single combined model incorporating all factors. The nitrogen and EDTA samples were excluded from analysis. The remaining chelator-methionine observations are shown in FIG. 14 and provide a pictorial motivation for the analyses described below. The RT/room Light condition, while included in the statistical model, has been removed from the graph below since this extreme stress condition was less relevant to the intended usage case.

[0727] For this reduced dataset the potential for a chelator-stress interaction is evident. But, within the DTPA-only samples the stress effect appears additive. This suggests a main effect statistical model is estimable and could be used to compare DTPA with/without methionine. Residual variance differences are possible based on the presence or absence of DTPA.

[0728] Based on the analysis presented, comparison of DTPA with or without 5 mM methionine with an air headspace was carefully examined. Using DTPA-only samples under air, a main effect linear model incorporating methionine and stress estimates a marginally significant average benefit with the addition of methionine in % HMW (difference 0.0375%, p ˜0.07%) at 4 weeks and a statistically significant average improvement in % HMW (difference 0.125%, p ˜0.0016) at 12 weeks across all stress conditions (data not shown).

[0729] Polysorbate 80

[0730] A subset of samples were tested to understand the stability of polysorbate—a surfactant critical to protect Nivo from forming particulates. Levels of PS80 for samples tested are shown in Table 77. PS80 does get oxidized by metal, peroxide, and light. Degradation is mitigated by the addition of a chelating agent (DTPA or EDTA). Conditions without chelator have a significant drop in PS80 levels upon storage. This drop can be observed even at 5° C. storage after 2 months. After 1 month of storage at 30° C. with metal and peroxide stress of which 3 days where at room temperature/room light, the samples without chelator drop to less than 0.1 mg/mL (from starting 0.5 mg/mL target). Headspace of nitrogen slightly protects the PS80 (0.08 mg/mL under nitrogen vs. 0.02 mg/mL under air).

TABLE 77
Study 1 - PS80 levels after 2 months at 5° C. and
1 month after 3 days at Light + Metal + Peroxide +
30° C./Dark [MPL] starting from 0.5 mg/mL initial PS80.

| | | | | PS80 MP | PS80 MPL |
|---|---|---|---|---|---|
| Formulation # | DTPA | EDTA | Met | 5 C. 2 M | 30 C. 1 M |
| (Headspace) | (uM) | (uM) | (mM) | (mg/mL) | (mg/mL) |
| 1 | 50 | 0 | 5 | 0.49 | 0.49 |
| 2 | 0 | 0 | 0 | 0.45 | 0.02 |
| 3 | 0 | 0 | 5 | 0.34 | 0.03 |
| 4 | 50 | 0 | 0 | 0.49 | 0.51 |
| 5 | 0 | 100 | 5 | 0.49 | 0.48 |
| 6 (N2) | 50 | 0 | 5 | 0.51 | 0.49 |
| 7 (N2) | 0 | 0 | 0 | 0.46 | 0.08 |

[0731] rHuPH20 Enzyme Activity

[0732] To assess the stability of rHuPH20, the enzyme activity was measured for a limited set of samples. Results from the enzyme activity assay are shown in FIG. 15. Enzyme levels for samples stored at 30° C./dark with MPL stress (metal and peroxide stress where the first 3 days where at room temperature/room light) are tabulated in FIG. 15 (middle). Formulations with both DTPA and Met (Formulation 1) out performs formulations with DTPA alone which out performs formulations with Met alone. Formulations with none (neither DTPA nor Methionine) had the largest enzyme activity drop.

[0733] Samples exposed to 3 days RT/dark followed by 30° C./dark FIG. 15 (left) show similar behavior where formulations with DTPA and Met and formulations with DTPA alone outperforms formulations with Met alone and formulations with neither DPTA nor Met.

[0734] The rHuH20 enzyme activity showed a different behavior for samples exposed to RT/RL FIG. 15 (right). For these conditions all formulation had non-reportable (low) levels of rHuPH20 activity for all 3 M sample except for the sample that was held under nitrogen headspace with DTPA and Met. The formulation differences are not observed after continuous exposure to room light with a headspace of air. These results suggest that headspace nitrogen in combination with DTPA and Met help protect the enzyme under continuous exposure to room temperature/room light.

[0735] Particulate Formation

[0736] Particulate formation was evaluated at the two-week time point for all stress conditions and formulations. Levels of large particulates ≥25 μm particles are low (less than 32 particles/mL) for all samples. The particulates ≥10 μm particles are all below 164 particles/mL for all samples. Samples with the highest particulate counts were conditions under room temperature/room light but the number of particles are well below the USP <788> specifications. No particulate issues are observed during this study.

[0737] the stability of the formulation was monitored by three key components: stability of Nivo by SEC, stability of rHuPH20 by monitoring enzyme activity, and stability of PS80 by measuring PS80 levels. For each of these quality attributes the formulation performance and rank ordering the best formulation to the worst (top to bottom) formulation is tabulated in Table 78.

[0738] Nivo stability by SEC shows HMW increase in response to oxidation stresses. Across the various combination of stresses (metal, peroxide, and light) the increase of HMW is protected by the presence of antioxidants. Combination of Met and DTPA demonstrate better stability over DTPA alone, which outperformed Met, which out performed formulations with neither DTPA nor Met.

[0739] rHuPH20 enzyme activity decreases in response to oxidation stresses. In particular the drop is significant due to light stress. The formulation composition benefits can be observed for a combination of metal, peroxide and light stress (3 days) conditions. The enzyme activity is best preserved with the presence of both Met and DTPA. There is a measurable drop in enzyme activity relative to DTPA alone, which has a measurable drop relative to Met alone, which has a measurable drop in activity relative to having no Met nor DTPA.

[0740] PS80 protection was observed for conditions that had a chelating agent (DTPA). Met did not protect PS80 from degrading.

TABLE 78
Study 1 - Quality attributes studied that were able to distinguish
formulations and the ranking of these formulations

| Quality | Nivo | rHuPH20 | |
|---|---|---|---|
| Attribute | SEC- HMW | Enzyme activity | PS80 stability |
| (best) | Met + DTPA | Met + DTPA | Met + DTPA = DTPA |
| Rank | DTPA | DTPA | Met = None |
| Ordering | Met | Met | |
| (worst) | None | None | |

[0741] Key results from investigating various combinations of peroxide, metal, and light with the addition of thermal stress at 30° C. with various formulations indicate that there is a benefit in the formulation having both 50 μM DTPA and 5 mM Met. The stability with just one of these anti-oxidants is less superior to having both the chelating agent and sacrificial antioxidant.

[0742] Results—Study 2

[0743] The formulations tabulated in Tables 68 and 69 were analyzed. In this study, the aim was to understand the factors and ranges where the benefits of this formulation can be observed. Factors and ranges explored were: pH: 5.2-6.8 His; Histidine: 10-100 mM (Alt: Succinate); DTPA 10-200 μM (Alt: 100 μM EDTA); Met: 1-20 mM (Alt: 10 mM Trp); rHuPH20: 0-5,000 U/mL; PS80: 0.01-0.1% w/v (Alt: PS20 and Poloxamer 0.2 mg/mL); Sugar: 10-400 mM sucrose; and Protein: 100-175 mg/mL. This resulted in 49 different formulations to be studied here. pH, DTPA and Met levels where co-varied. Formulations at the max and min of the excipient ranges were varied one-variable at a time with all other factors at the target composition. The target composition is: 120 mg/mL Nivo in 20 mM Histidine, 250 mM Sucrose, 50 μM DTPA, 5 mM Met, 2,000 U/mL rHuPH20, 0.05% w/v PS80 at pH 6.0 with air headspace. Note there were duplicate independent formulation preparations in the design for the center point condition and the condition with 50 μM DTPA and no Met. The distribution of the formulation studied is shown in FIGS. 16A-16F.

[0744] Similar to the formulation ranges studied at the target composition alternate excipients: succinate, 100 μM EDTA, 10 mM Trp, 0.05% w/v PS20, poloxamer 0.2 mg/mL, 10% sorbitol and trehalose, were also studied with other excipients at the target composition.

[0745] Size Exclusion Chromatography

[0746] Size exclusion chromatography was the primary tool used to monitor the stability of Nivolumab.

[0747] Reproducibility

[0748] The duplicate and independent formulation preparations were included in the design for the center point condition and the condition with 50 μM DTPA and no Met. The final HMW by SEC by stress and time point for these formulations are tabulated in Table 79.

TABLE 79
Study 2 - High molecular weight species by SEC for the last time point in each of
the stress condition studied for the duplicate samples - center and 0 Met formulations.
Center formulation composition: 120 mg/mL Nivo, 20 mM Histidine, 250 mM Sucrose,
50 μM DTPA, 5 mM Met, 0.05% w/v PS80 at pH 6.0. 0 Met composition: 120 mg/mL
Nivo, 20 mM Histidine, 250 mM Sucrose, 50 μM DTPA, 0.05% w/v PS80 at pH 6.0.

| | | | % HMW by SEC | | | | | |
|---|---|---|---|---|---|---|---|---|
| | | | 5° C. | 25° C. | 35° C. | RT/30 | RT/RL | MPL |
| Formulation | Descriptor | DS Source | 6 M | 6 M | 3 M | 3 M | 1 M | 3 M |
| 15 | Center | Nivo DS | 0.9 | 1.4 | 1.7 | 1.2 | 1.9 | 1.5 |
| 28 | Center | Nivo DS | 0.9 | 1.4 | 1.8 | 1.3 | 1.8 | 1.6 |
| 49 | Center | Sugar-free DS | 0.8 | 1.3 | 1.6 | — | — | — |
| 21 | 0 Met | Nivo DS | 0.9 | 1.5 | 1.8 | 1.3 | 1.9 | 1.8 |
| 29 | 0 Met | Nivo DS | 0.9 | 1.5 | 1.8 | 1.3 | 1.9 | 1.8 |

[0749] Enzyme Level

[0750] In this study a range of enzyme levels was studied between 0 to 5,000 U/mL. The final HMW by SEC for varied enzyme levels is tabulated for the final time point for that stress condition in Tale 80. The formulation composition had varied level of enzyme with 120 mg/mL Nivo, 20 mM histidine, 250 mM sucrose, 50 μM DTPA, 5 mM Met, 0.05% w/v PS80 at pH 6.0. Enzyme level had no impact on the formation of HMW species across all stress conditions studied.

TABLE 80
Study 2- High molecular weight species by SEC for the last time
point in each of the stress condition studied for varied enzyme
level. Formulation composition: 120 mg/mL Nivo, 20 mM Histidine,
250 mM Sucrose, 50 μM DTPA, 5 mM Met, 0.05% PS80 at pH 6.0.

| | % HMW by SEC | | | | | |
|---|---|---|---|---|---|---|
| Enzyme | 5° C. | 25° C. | 35° C. | RT/30 | RT/RL | MPL |
| (U/mL) | 6 M | 6 M | 3 M | 3 M | 1 M | 3 M |
| 0 | 0.9 | 1.4 | 1.8 | 1.2 | 1.9 | 1.6 |
| 500 | 1.0 | 1.4 | 1.8 | 1.2 | 1.9 | 1.6 |
| 2000 | 0.9 | 1.4 | 1.7 | 1.2 | 1.9 | 1.5 |
| 2000 | 0.9 | 1.4 | 1.8 | 1.3 | 1.8 | 1.6 |
| 5000 | 0.9 | 1.4 | 1.8 | 1.2 | 1.9 | 1.6 |

[0751] Alternate Excipients

[0752] In this study alternate excipients were studied with the center point composition for all other excipients. As an alternate surfactant to PS80 at 0.05% w/v, 0.05% w/v PS20 and 0.2 mg/mL poloxamer were studied. As an alternate buffer to 20 mM histidine 20 mM succinate was studied. Surfactant and buffer alternatives were unlikely to have a large impact protection against oxidation so performance for these alternatives were studied under thermal stress conditions. The final HMW by SEC using these alternate excipients is tabulated for the final time point for that stress condition next to the center point conditions (with the target formulation composition of 120 mg/mL Nivo, 20 mM histidine, 250 mM sucrose, 50 μM DTPA, 5 mM Met, 2,000 U/mL rHuPH20, 0.05% w/v PS80 at pH 6.0) in Table 81. As an alternate excipient PS80 can be replaced by PS20 or poloxamer with minimal impact to stability. The formulation with histidine as a buffering agent is critical for Nivo stability and cannot be replaced with succinate. There is a substantial increase in HMW species with succinate buffer across all thermal stress conditions studied (5° C. 25° C. and 35° C.).

TABLE 81
Study 2 - High molecular weight species by SEC for the last
time point in each of the stress condition studied for
alternate excipients. Center point composition: 120 mg/mL
Nivo, 20 mM Histidine, 250 mM Sucrose, 50 μM DTPA, 5
mM Met, 0.05% w/v PS80, 2000 U/mL rHuPH20 at pH 6.0.

| | % HMW by SEC | | |
|---|---|---|---|
| | 5° C. | 25° C. | 35° C. |
| Alternate Excipient | 6 M | 6 M | 3 M |
| Center | 0.9 | 1.4 | 1.7 |
| Center | 0.9 | 1.4 | 1.8 |
| PS20 | 0.9 | 1.3 | 1.7 |
| Poloxamer | 0.9 | 1.3 | 1.7 |
| Succinate | 1.3 | 3.2 | 6.8 |

[0753] As an alternate chelator to 50 μM DTPA, 100 μM EDTA was studied. DTPA is a better chelating agent so a higher level of EDTA was studied here. Similarly, as an alternate sacrificial agent to 5 mM methionine, 10 mM tryptophan was studied. Since addition of chelator and sacrificial oxidizing agent can impact protection against oxidation these were studied under both thermal and oxidation stress conditions. The final HMW by SEC using these alternate excipients is tabulated for the final time point for that stress condition next to the center point condition and the corresponding controls (with the center point formulation composition of 120 mg/mL Nivo, 20 mM histidine, 250 mM sucrose, 50 μM DTPA, 5 mM Met, 2,000 U/mL rHuPH20, 0.05% PS80 at pH 6.0) in Table 82.

TABLE 82
Study 2 High molecular weight species by SEC for the
last time point in each of the stress condition studied
for alternate excipients to DTPA and Met. Composition
includes: 120 mg/mL Nivo, 20 mM Histidine, 250 mM Sucrose,
0.05% w/v PS80, 2000 U/mL rHuPH20 at pH 6.0.

| | % HMW by SEC | | | | | |
|---|---|---|---|---|---|---|
| | 5° C. | 25° C. | 35° C. | RT/30 | RT/RL | MPL |
| Formulation | 6 M | 6 M | 3 M | 3 M | 1 M | 3 M |
| 5 mM Met | 0.9 | 1.4 | 1.7 | 1.2 | 1.9 | 1.5 |
| 50 μm DTPA | | | | | | |
| 5 mM Met | 0.9 | 1.4 | 1.8 | 1.3 | 1.8 | 1.6 |
| 50 μm DTPA | | | | | | |
| 10 mM Trp | 0.9 | 1.4 | 1.8 | 1.2 | 2.4 | 1.9 |
| 50 μm DTPA | | | | | | |
| 5 mM Met | 0.9 | 1.5 | 1.8 | 1.3 | 1.8 | 2.1 |
| 100 μM EDTA | | | | | | |
| 0 mM Met | 1 | 1.7 | 2.1 | 1.3 | 1.9 | 3.7 |
| 100 μM EDTA | | | | | | |
| 0 mM Met | 0.9 | 1.5 | 1.8 | 1.3 | 1.9 | 1.8 |
| 50 μM DTPA | | | | | | |
| 0 mM Met | 0.9 | 1.5 | 1.8 | 1.3 | 1.9 | 1.8 |
| 50 μM DTPA | | | | | | |

[0754] The tabulated % HMW values after 3 months with MPL stress clearly shows the unique benefit of having DTPA, and that it is a superior chelator, compared to EDTA. The % HMW observed was 1.6% vs. 2.1% HMW after 3 months with MPL stress. Evaluation of the chelator alone (with no Met) further illustrates the benefit of DTPA over EDTA (1.8% HMW for DTPA vs. 3.7% HMW for EDTA after 3M of MPL stress). Similarly, the data shows that Met is superior to Trp. The HMW observed was 1.9% for Met vs. 2.4% for Trp after 1M at RT/RL and 1.5% for Met vs. 1.9% HMW for Trp after 3M MPL. % HMW increase is best controlled when formulated with 5 mM Met and 50 μM DTPA. These results are in agreement with Study 1.

[0755] Levels of DTPA

[0756] A range of DTPA levels were studied from 0-200 μM with the center point formulation composition of 120 mg/mL Nivo, 20 mM histidine, 250 mM sucrose, 5 mM Met, 2,000 U/mL rHuPH20, 0.05% w/v PS80 at pH 6.0. The final HMW by SEC at various Met levels is tabulated for the final time point for that stress condition in Table 83. Across accelerated thermal conditions (25° C., and 35° C.) and the MPL oxidation conditions there is an impact of having 0 μM DTPA; however, between the concentrations of 10-200 μM no compelling evidence of a concentrate dependent DTPA effect is observed. This behavior is consistent across stress conditions across time as shown in FIG. 17.

TABLE 83
Study 2 High molecular weight species by SEC for the
last time point in each of the stress condition studied
for various DTPA levels. Composition includes: 120
mg/mL Nivo, 20 mM Histidine, 250 mM Sucrose, 5 mM Met,
0.05% w/v PS80, 2000 U/mL rHuPH20 at pH 6.0.

| | % HMW by SEC | | | | | |
|---|---|---|---|---|---|---|
| DTPA | 5° C. | 25° C. | 35° C. | RT/30 | RT/RL | MPL |
| (μM) | 6 M | 6 M | 3 M | 3 M | 1 M | 3 M |
| 0 | 1.0 | 1.8 | 2.2 | 1.4 | 2.0 | 2.4 |
| 10 | 0.9 | 1.4 | 1.7 | 1.2 | 1.8 | 1.5 |
| 50 | 0.9 | 1.4 | 1.7 | 1.2 | 1.9 | 1.5 |
| 50 | 0.9 | 1.4 | 1.8 | 1.3 | 1.8 | 1.6 |
| 100 | 0.9 | 1.4 | 1.7 | 1.2 | 1.8 | 1.6 |
| 200 | 0.9 | 1.4 | 1.7 | 1.2 | 2.0 | 1.5 |

[0757] Levels of Methionine

[0758] A range of methionine (Met) levels were studied from 0-20 mM Met with the center point formulation composition of 120 mg/mL Nivo, 20 mM histidine, 250 mM sucrose, 50 μM DTPA, 2,000 U/mL rHuPH20, 0.05% w/v PS80 at pH 6.0. The final HMW by SEC at various Met levels is tabulated for the final time point for that stress condition in Table 84. For the thermal conditions (5° C., 25° C., 35° C., and RT/30° C. control) there is no major impact due to changes in Met levels. The benefit of higher levels of Met is observed in combination with DTPA under oxidation stress conditions of RT/RL over 1 month and MPL for 3 months. The benefits are minimal due to the larger impact adding DTPA has on HMW formation in all these formulations.

TABLE 84
Study 2 High molecular weight species by SEC for the
last time point in each of the stress condition studied
for various Met levels. Composition includes: 120 mg/mL
Nivo, 20 mM Histidine, 250 mM Sucrose, 50 μM DTPA,
0.05% w/v PS80, 2000 U/mL rHuPH20 at pH 6.0.

| Met | % HMW by SEC | | | | | |
|---|---|---|---|---|---|---|
| Level | 5° C. | 25° C. | 35° C. | RT/30 | RT/RL | MPL |
| (mM) | 6 M | 6 M | 3 M | 3 M | 1 M | 3 M |
| 0 | 0.9 | 1.5 | 1.8 | 1.3 | 1.9 | 1.8 |
| 0 | 0.9 | 1.5 | 1.8 | 1.3 | 1.9 | 1.8 |
| 1 | 0.9 | 1.5 | 1.7 | 1.3 | 1.9 | 1.7 |
| 5 | 0.9 | 1.4 | 1.7 | 1.2 | 1.9 | 1.5 |
| 5 | 0.9 | 1.4 | 1.8 | 1.3 | 1.8 | 1.6 |
| 10 | 0.9 | 1.4 | 1.6 | 1.2 | 1.8 | 1.5 |
| 20 | 0.9 | 1.4 | 1.7 | 1.2 | 1.6 | 1.4 |

[0759] The time course change in % HMW under each condition is shown in FIG. 18. Across stress conditions 0 μM DTPA with 0 mM Met has the highest HMW level. Differentiation between 0 and 5 mM methionine formulations at the 0 μM DTPA level is clear-addition of Met is beneficial to the stability of Nivo. At the target 50 μM DTPA concentration the effect of Met levels at various stresses at 2 weeks and 1 month timepoints are harder to differentiate. However, at the 3 month and 6 month timepoints careful evaluation is needed.

[0760] Careful evaluation of the MPL (Metal+Peroxide+3D of light followed by 30° C./Dark stress condition) is shown in FIG. 19. Note: for the formulation with 0 mM Met with 50 μM DTPA and the formulation with 5 mM Met with 50 μM DTPA there are duplicate independent formulations marked by two and three * marks. The 0 and 5 mM Met formulations at 0 μM DTPA differentiate at all three time points. At 50 μM DTPA concentration the % HMW formation appears to be a function of methionine concentration at both 1 and 3 month timepoints under these MPL conditions. In particular, for the MPL stress condition at the 3 month timepoint, the benefits of having higher level of Met is clearly observed. The HWM formation at the 100 and 200 μM DTPA with 5 mM Met concentration is similar to the 50 μM DTPA with 5 mM Met level. This is due to the binary effect of having DTPA but no compelling evidence of a concentration dependent DTPA effect as discussed above.

[0761] pH

[0762] A range of pH levels were studied from 5.2 to 6.8 with the center point formulation composition of 120 mg/mL Nivo, 20 mM Histidine, 250 mM Sucrose, 50 μM DTPA, 5 mM Met, 2,000 U/mL rHuPH20, 0.05% w/v PS80. The final HMW by SEC at various pH levels is tabulated for the final time point for that stress condition in Table 85. Across all thermal conditions (5° C., 25° C., and 35° C.) and the oxidation conditions (RT/RL, MPL, and RT/30° C. control), there is an impact of having higher pH. Between the pH range of 5.2 to 6.5 the formulation has good stability.

TABLE 85
Study 2 High molecular weight species by SEC for the
last time point in each of the stress condition studied
for various pH levels. Composition includes: 120 mg/mL
Nivo, 20 mM Histidine, 250 mM Sucrose, 50 μM DTPA,
5 mM Met, 0.05% w/v PS80, and 2000 U/mL rHuPH20.

| | % HMW by SEC | | | | | |
|---|---|---|---|---|---|---|
| | 5° C. | 25° C. | 35° C. | RT/30 | RT/RL | MPL |
| pH | 6 M | 6 M | 3 M | 3 M | 1 M | 3 M |
| 5.2 | 1.0 | 1.4 | 1.9 | — | — | — |
| 5.5 | 0.9 | 1.5 | 1.8 | 1.2 | 1.8 | 1.5 |
| 6.0 | 0.9 | 1.4 | 1.7 | 1.2 | 1.9 | 1.5 |
| 6.0 | 0.9 | 1.4 | 1.8 | 1.3 | 1.8 | 1.6 |
| 6.5 | 1.1 | 1.8 | 2.0 | 1.5 | 2.7 | 2.1 |
| 6.8 | 1.2 | 2.6 | 4.1 | — | — | — |

[0763] DOE Evaluation of pH, Met, and DTPA Levels

[0764] There was a small excipient characterization DOE run on the combination of pH, Met, and DTPA levels. The formulations in the DOE are tabulated in Table 86 with all formulations containing 120 mg/mL Nivo, 20 mM Histidine, 250 mM Sucrose, 2,000 U/mL rHuPH20, and 0.05% PS80. The final HMW by SEC at various Met levels is tabulated for the final time point for that stress condition. Examination of the results show the clear pH effect across all stress conditions. The results in this part of the study are consistent with the univariant study results described above. For the MPL condition the dominant effect is pH, with higher pH resulting in higher HMW values. There is a protective effect with higher levels of Met, and DTPA levels studied here (10-100 μM) do not impact the HMW.

TABLE 86
Study 2 High molecular weight species by SEC for the last
time point in each of the stress condition studied for the
DOE that investigated impact of pH, Met, and DTPA levels.
Composition includes: 120 mg/mL Nivo, 20 mM Histidine, 250
mM Sucrose, 0.05% w/v PS80, and 2000 U/mL rHuPH20.

| | DTPA | Met | 5° C. | 25° C. | 35° C. | RT/30 | RT/RL | MPL |
|---|---|---|---|---|---|---|---|---|
| pH | (uM) | (mM) | 6 M | 6 M | 3 M | 3 M | 1 M | 3 M |
| 5.2 | 50 | 5 | 1 | 1.4 | 1.9 | — | — | — |
| 5.5 | 10 | 1 | 0.9 | 1.5 | 1.9 | 1.3 | 1.7 | 1.5 |
| 5.5 | 10 | 10 | 0.9 | 1.4 | 1.8 | 1.2 | 1.6 | 1.4 |
| 5.5 | 100 | 1 | 0.9 | 1.5 | 1.9 | 1.3 | 1.8 | 1.6 |
| 5.5 | 100 | 10 | 0.9 | 1.4 | 1.8 | 1.2 | 1.6 | 1.4 |
| 5.5 | 50 | 5 | 0.9 | 1.5 | 1.8 | 1.2 | 1.8 | 1.5 |
| 6 | 10 | 5 | 0.9 | 1.4 | 1.7 | 1.2 | 1.8 | 1.5 |
| 6 | 100 | 5 | 0.9 | 1.4 | 1.7 | 1.2 | 1.8 | 1.6 |
| 6 | 50 | 1 | 0.9 | 1.5 | 1.7 | 1.3 | 1.9 | 1.7 |
| 6 | 50 | 10 | 0.9 | 1.4 | 1.6 | 1.2 | 1.8 | 1.5 |
| 6 | 50 | 5 | 0.9 | 1.4 | 1.7 | 1.2 | 1.9 | 1.5 |
| 6 | 50 | 5 | 0.9 | 1.4 | 1.8 | 1.3 | 1.8 | 1.6 |
| 6 | 50 | 5 | 0.8 | 1.3 | 1.6 | — | — | — |
| 6.5 | 10 | 1 | 1.1 | 1.8 | 2.1 | 1.6 | 2.8 | 2.2 |
| 6.5 | 10 | 10 | 1.1 | 1.8 | 1.9 | 1.5 | 2.7 | 1.9 |
| 6.5 | 100 | 1 | 1.1 | 1.8 | 2 | 1.6 | 2.8 | 2.4 |
| 6.5 | 100 | 10 | 1.1 | 1.7 | 1.9 | 1.5 | 2.6 | 1.9 |
| 6.5 | 50 | 5 | 1.1 | 1.8 | 2 | 1.5 | 2.7 | 2.1 |
| 6.8 | 50 | 5 | 1.2 | 2.6 | 4.1 | — | — | — |

[0765] Impact of Histidine Levels

[0766] A range of histidine levels was studied from 10 to 100 mM with the center point formulation composition of 120 mg/mL Nivo, 250 mM Sucrose, 50 μM DTPA, 5 mM Met, 2,000 U/mL rHuPH20, 0.05% w/v PS80 at a pH of 6.0. The final HMW by SEC at various histidine levels are tabulated for the final time point for that stress condition in Table 87. The data suggest that histidine is not only the buffering agent in the formulation, but also has protective properties with higher histidine levels increasing the stability of the protein. At low histidine concentrations the protective behavior is minimized especially below 20 mM Histidine. The data here suggest a cliff below this 20 mM histidine level. The exact location of this cliff is unknown. A histidine concentration range of 15 mM-100 mM is expected to have comparable and good stability.

TABLE 87
Study 2 High molecular weight species by SEC for the
last time point in each of the stress condition studied
for various histidine levels. Composition includes:
120 mg/mL Nivo, 250 mM Sucrose, 50 μM DTPA, 5 mM
Met, 0.05% w/v PS80, and 2000 U/mL rHuPH20 at a pH of 6.0

| | % HMW by SEC | | |
|---|---|---|---|
| | 5° C. | 25° C. | 35° C. |
| His (mM) | 6 M | 6 M | 3 M |
| 10 mM | 1.1 | 2.1 | 4.1 |
| 20 mM | 0.9 | 1.4 | 1.7 |
| 20 mM | 0.9 | 1.4 | 1.8 |
| 50 mM | 0.9 | 1.1 | 1.5 |
| 100 mM | 0.8 | 0.9 | 1.3 |

[0767] Impact of Protein Concentration

[0768] The range of protein concentration studied was from 100 to 175 mg/mL, with the center point formulation composition of 20 mM Histidine, 250 mM Sucrose, 50 μM DTPA, 5 mM Met, 2,000 U/mL rHuPH20, 0.05% w/v PS80 at a pH of 6.0. The final HMW by SEC at various protein concentrations are tabulated for the final time point for that stress condition in Table 88. Higher protein concentrations have shown higher HMW formation and is consistent with other studies at higher protein concentration.

TABLE 88
Study 2 High molecular weight species by SEC for the last
time point in each of the stress condition studied for
various protein concentrations. Composition includes:
20 mM Histidine, 250 mM Sucrose, 50 μM DTPA, 5 mM Met,
0.05% w/v PS80, and 2000 U/mL rHuPH20 at a pH of 6.0

| Protein | % HMW by SEC | | |
|---|---|---|---|
| Conc | 5° C. | 25° C. | 35° C. |
| (mg/mL) | 6 M | 6 M | 3 M |
| 100 | 0.9 | 1.3 | 1.6 |
| 120 | 0.9 | 1.4 | 1.7 |
| 120 | 0.9 | 1.4 | 1.8 |
| 175 | 1.2 | 3 | 6.3 |

[0769] Impact of Sucrose Concentration

[0770] The range of sucrose concentration studied was from 0 to 400 mM with the center point formulation composition of 120 mg/mL Nivo, 20 mM histidine, 50 μM DTPA, 5 mM Met, 2,000 U/mL rHuPH20, 0.05% w/v PS80 at a pH of 6.0. The final HMW by SEC at various sucrose concentrations are tabulated for the final time point for that stress condition in Table 89. Low sucrose levels have lower stability. The elevated HMW values are not concerning in the range of 10-400 mM sucrose.

TABLE 89
Study 2 High molecular weight species by SEC for the last
time point in each of the stress condition studied for
various sucrose concentrations. Composition includes:
120 mg/mL Nivo, 20 mM Histidine, 50 μM DTPA, 5 mM Met,
0.05% w/v PS80, and 2000 U/mL rHuPH20 at a pH of 6.0

| | % HMW by SEC | | |
|---|---|---|---|
| Sucrose | 5° C. | 25° C. | 35° C. |
| (mM) | 6 M | 6 M | 3 M |
| 0 | 1 | 1.9 | 2.3 |
| 10 | 1 | 1.7 | 2.2 |
| 250 | 0.9 | 1.4 | 1.7 |
| 250 | 0.9 | 1.4 | 1.8 |
| 400 | 0.9 | 1.2 | 1.6 |

[0771] Impact of PS80 Concentration

[0772] The range of PS80 concentration studied was from 0 to 0.10 w/v PS80 with the center point formulation composition of 120 mg/mL Nivo, 20 mM histidine, 250 mM sucrose, 50 μM DTPA, 5 mM Met, 2,000 U/mL rHuPH20, at a pH of 6.0. The final HMW by SEC at various PS80 concentrations were tabulated for the final time point for that stress condition in Table 90. The HMW values observed are constant in the range of the formulation compositions studied.

TABLE 90
Study 2 High molecular weight species by SEC for the last
time point in each of the stress conditions studied for
various PS80 concentrations. Composition includes: 120
mg/mL Nivo, 20 mM histidine, 250 mM sucrose 50 μM
DTPA, 5 mM Met, and 2000 U/mL rHuPH20 at a pH of 6.0

| | % HMW by SEC | | |
|---|---|---|---|
| PS80 | 5° C. | 25° C. | 35° C. |
| (%) | 6 M | 6 M | 3 M |
| 0 | 0.9 | 1.4 | 1.7 |
| 0.01 | 0.9 | 1.4 | 1.7 |
| 0.05 | 0.9 | 1.4 | 1.7 |
| 0.05 | 0.9 | 1.4 | 1.8 |
| 0.10 | 0.9 | 1.4 | 1.7 |

[0773] Impact of Nitrogen Headspace

[0774] To understand the benefits of the formulation—nitrogen headspace was used to determine its impact on HMW during oxidation stress, as well as thermal stress. The two formulations studied are the target center point formulation condition of: 120 mg/mL Nivo, 20 mM histidine, 250 mM sucrose, 50 μM DTPA, 5 mM Met, 2,000 U/mL rHuPH20, 0.05% w/v PS80 at a pH of 6.0 and the condition with no DTPA nor Met: 120 mg/mL Nivo, 20 mM Histidine, 250 mM Sucrose, 2,000 U/mL rHuPH20, 0.05% w/v PS80 at a pH of 6.0. The final HMW by SEC for these two formulations with nitrogen and air head space are tabulated in Table 91 for the final time point for that stress condition.

TABLE 91
Study 2 High molecular weight species by SEC for the last time
point in each of the stress condition studied for 2 formulations
with and with-out nitrogen headspace. Center composition is
120 mg/mL Nivo, 20 mM histidine, 250 mM sucrose 50 μM DTPA,
5 mM Met, 0.05% w/v PS80 and 2000 U/mL rHuPH20 at a pH of
6.0. 0 DTPA 0 Met refer to the removal of both anti-oxidants
(DTPA and Met) from the center point formulation.

| | % HMW by SEC | | | | | |
|---|---|---|---|---|---|---|
| Formulation - | 5° C. | 25° C. | 35° C. | RT/30 | RT/RL | MPL |
| Headspace | 6 M | 6 M | 3 M | 3 M | 1 M | 3 M |
| Center-Air | 0.9 | 1.4 | 1.7 | 1.2 | 1.9 | 1.5 |
| Center - N₂ | 1 | 1.4 | 1.7 | 1.2 | 1.5 | 1.5 |
| 0 DTPA 0 Met - Air | 1 | 2.6 | 3.3 | 1.6 | 2.3 | 3.3 |
| 0 DTPA 0 Met - N₂ | 1 | 1.7 | 2.4 | 1.4 | 1.7 | 3 |

[0775] The data show the clear benefit of the center point formulation with both DTPA and Met relative to the composition with no DPTA nor Met. In the cases where no anti-oxidant (sacrificial agent and chelator) are added there is a benefit of having nitrogen headspace. The interesting behavior is the slight difference in behavior of the center point formulation under RT/RL condition. Here, the nitrogen headspace helps reduce the HMW formation. However, under the MPL condition the nitrogen headspace doesn't impact the HMW formation when both chelating agent and sacrificial agent are present. The formulation containing both sacrificial agent and chelator is able to protect against HMW formation from oxidation stresses coming from minor light (3 days), peroxide and metals compared to having neither sacrificial nor chelating agents.

[0776] Statistical Model: Final Time Point for pH 6 50 μM DTPA Concentration Formulations

[0777] Statistical models were evaluated for the total % HMW. Due to small/negligible effects observed across most stress conditions statistical models were only developed for a subset of the stress conditions. Various mixed models were also explored (not shown) assuming a linear model for % HMW versus time (days). Due to design constraints, a limited number of degrees of freedom for estimating inter- and intra-formulation variability and % HMW root-mean-square-error (RMSE) of approximately 0.15 to 0.25% average confidence intervals for key comparisons substantially overlapped for the stress conditions at 12 weeks. Results from the first study estimated an average % HMW difference of 0.125% for the two key formulation comparisons (above). All analyses were performed using JMP 15.2.0.

[0778] Close evaluation of the 25° C., 35° C. and MPL conditions provides weak to pronounced evidence of a no-yes DTPA beneficial effect for these three stress conditions for at least the longest time point at pH 6. Moreover, a 0-5 mM no-yes methionine effect was observed for the no-DTPA pH 6 formulations. To simplify the presentation of results, statistical models were developed for each of these three stress conditions at only the last measured time point. % HMW RMSE's of approximately 0.15 to 0.25% under various statistical models were observed even when restricted to the pH 6-only formulations. To further lessen the need for potentially inadequate empirical models only statistical results at 50 μM DTPA are outlined. Model complexity and/or nonlinearity, e.g., due to the inclusion of the no-DTPA samples, may increase the residual variance for mis- or underspecified models.

[0779] FIG. 20 shows a graph of SEC % HMW versus methionine concentration at the three last-sampled stress conditions with a smooth curve trend estimate.

[0780] For the 35° C. 3 month samples the replicate variability is large relative to the remaining signal. Only three distinct values were obtained for the 25° C.-6 month measurements. Little-or-no trend is evident for these two thermal stress conditions. A near-linear trend is most evident for the combined oxidation stress—MPL condition at 3 months.

[0781] A simple linear regression was estimated for each condition to evaluate the strength of the observed relationship (FIGS. 21A-21C).

[0782] Only the combined oxidation stress condition (MPL) linear regression was significant (p ˜0.0088). These data suggest a clear benefit of increasing methionine concentration in the presence of 50 μM DTPA for this oxidative stress condition. Model lack of fit was not detected (a curvilinear model was also estimated with improved fit, not shown) and the average % HMW RMSE was approximately 0.06 to 0.08% across all three regressions. The predicted average % HMW at 3 months for the 50 μM DTPA-0 mM methionine formulation is 1.73% (95% confidence interval 1.62-1.83); the corresponding 50 μM DTPA-5 mM methionine estimate is 1.63% (95% confidence interval 1.55-1.71). The average difference between these estimates is approximately equal to the 0.125% average difference observed in the first study (above) between the same two formulations under the MPL oxidative stress conditions at 3 months.

[0783] Charge Variants

[0784] Charge variants were assessed using iCIEF. A sub-set of samples focused on the benefits of having two anti-oxidants was studied in detail to evaluate the impact of charge variants on Nivo. Samples tested were for the 3 M time point for the MPL oxidation stress condition and the 3 M time point for the 35° C. thermal stress. The results are graphed in FIGS. 22A-22B.

[0785] The % acidic species is highest for conditions with no anti-oxidants (None). Methionine alone has less protection than having both just DTPA or having both DTPA and Methionine. There is no difference between formulations with DTPA alone vs. formulations with both DTPA and Met when stored at the 35° C. condition. A slight benefit can be observed in the 3 month timepoint under MPL stress for 3 months.

[0786] CE-SDS

[0787] CE-SDS was used to measure the clipped species of Nivo. A sub-set of samples focused on the benefits of having two antioxidants was studied in detail to evaluate the impact of the formulation on protecting Nivo from oxidation. Samples tested were for the 3 M time point for the MPL oxidation stress condition and the 35° C. 3 M time point. The results for the main peak area % are tabulated in Table 92. No major difference in main peak area is detected across the samples relative to the initial (TO) samples. No changes in LMW species formation over the study conditions studied were detected across the formulations studied.

TABLE 92
Study 2 CE-SDS main peak area percent as a function of
time under MPL condition and 35° C. stress. Duplicate
samples were prepared for formulations with DTPA and Met
as well as for samples with DTPA alone. Formulations had
DTPA at 50 μM and Met at 5 mM concentrations. All formulations
also contain 120 mg/mL Nivo, 20 mM histidine, 250 mM sucrose,
0.05% w/v PS80, 2,000 U/mLrHuPH20 at pH 6.0

| | CE-SDS Main peak (%) | | |
|---|---|---|---|
| | | 35 C. T | MPL |
| Formulation | T0 | 3 M | 3 M |
| DTPA and Met | 97.0 | 97.2 | 98.5 |
| DTPA and Met | 97.0 | 97.6 | 97.6 |
| DTPA | 97.0 | 96.7 | 98.2 |
| DTPA | 96.9 | 98.2 | 97.9 |
| Met | 96.7 | 96.7 | 98.0 |
| None | 96.3 | 96.8 | 98.0 |

[0788] Enzyme Activity

[0789] Enzyme activity was measured to determine stability of the rHuPH20 enzyme. A sub-set of samples focused on the benefits of having two antioxidants was studied in detail to evaluate the impact of the formulation on protecting the enzyme from oxidation—the primary degradation mechanism. Samples tested were for the 3 M time point for the MPL oxidation stress condition and the 35° C. 3 M time point. The results are graphed in FIGS. 23A-23B.

[0790] The enzyme degradation was highest for conditions with no anti-oxidants (None). Methionine alone has less protection than having just DTPA. Having both DTPA and Methionine offers the best protection. The benefits were more pronounced looking at the MPL stress condition but consistent trend was observed between both 35° C. and MPL conditions. These results are consistent with what was observed in Study 1, above.

[0791] PS80 Stability

[0792] PS80 stability was measured to determine stability of the key excipient, PS80. A sub-set of samples focused on the benefits of having two antioxidants was studied in detail to evaluate the impact of the formulation on protecting the PS80 from oxidation. Samples tested were for the 3 M time point for the MPL oxidation stress condition and the 35° C. 3 M time point. The results are graphed in FIGS. 24A-24B.

[0793] The PS80 degradation was high and PS80 levels drop to zero for the condition without DTPA (data not shown) under the MPL stress condition. The distinction between None and Met alone can be observed for the 35° C. condition at the 3 M time point. The PS80 degradation kinetics are fastest for the conditions with no antioxidants (None) followed by the methionine alone condition. Both MPL and 35° C. stress conditions show comparable protection to PS80 between formulation having just DTPA and formulation having both DTPA and Methionine. The key feature from a PS80 stability perspective was the inclusion of DTPA. These results are consistent with what was observed in Study 1.

[0794] Formulation Ranges and Alternate Excipients

[0795] Study 2 was set-up to determine the impact and ranges where the benefits of the formulation composition is observed primarily by SEC. Formulations were stressed with thermal stress (5, 25, 35° C.) alone or with thermal and oxidation stress (MPL, RT/RL).

[0796] Based on this study the formulation composition ranges where stability is best maintained are as follows: pH: 5.2-6.5 His; Histidine: 15-100 mM; DTPA 10-200 μM (Alt: 100 μM EDTA); Met: 1-20 mM (Alt: 10 mM Trp); rHuPH20: 0-5,000 U/mL; PS80: 0.01-0.1% w/v (Alt: PS20 0.05% w/v and Poloxamer 0.2 mg/mL); Sugar: 10-400 mM sucrose; and Protein: 100-175 mg/mL

[0797] The center point formulation is: 120 mg/mL Nivo, 20 mM histidine, 250 mM sucrose, 5 mM Met, 50 μM DTPA, 0.05% w/v polysorbate 80 at pH 6.0 with 2,000 U/mL rHuPH20.

[0798] The histidine buffer is critical in the formulation-formulations at the same pH using succinate as the buffer did not demonstrate sufficient stability (Table 91). Histidine has a stabilizing effect that shows increasing stability at higher concentrations. In this study up to 100 mM histidine was studied (Table 87) but higher histidine concentrations are expected to be stable as well. At low histidine concentrations the stability drops. In particular, at histidine concentrations less than 10 mM the % HMW increases. The range between 15-100 mM is critical in minimizing HMW species formation.

[0799] The pH range is also critical—higher pH past pH of 6.5 shows an increase in HMW on stability (Table 85).

[0800] Nivo in the absence of sucrose results in slightly higher levels of HMW formation (Table 89). Sucrose between 10-400 mM demonstrates good stability.

[0801] PS80 levels studied here between 0-0.1% protected Nivo from HMW formation (Table 90). Alternate surfactants: PS20 (0.05% w/v) and poloxamer (0.2 mg/mL) demonstrated good protection for Nivo against HMW formation (Table 81).

[0802] Addition of enzyme in the range between 0 to 5,000 U/mL does not impact the stability of Nivo (Table 80).

[0803] This report demonstrates the need for two anti-oxidants. One sacrificial agent (Met) is needed in addition to a chelating agent (DTPA). In particular these two anti-oxidants perform better than their alternative excipients (Table 82). To confirm the superiority of the chosen excipient the performance of alternative oxidation agents has been tested at higher concentrations. Replacing 5 mM Met with 10 mM Trp results in higher HMW under both RT/RL conditions as well as under the MPL stress condition. Replacement of 50 μM DTPA with 100 μM EDTA behaves comparably under RT/RL conditions but shows higher HMW species formation under accelerated thermal conditions and under MPL stress condition. The combined formulation has oxidation protection that doesn't need nitrogen headspace to protect against MPL stresses (Table 91).

[0804] The DTPA levels between 10-200 μM have demonstrated comparable stability (Table 83). Having DTPA at a minimum concentration of 10 μM is critical but higher levels of DTPA do not increase the stability of Nivo.

[0805] Increase in Met has demonstrated acceptable stability within the range of 1-20 mM levels (Table 84). For the case of Met a statistical model was built and for the MPL stress condition a linear regression was found to be significant (above). This shows that there is a clear benefit of having Met and higher concentrations of Met being favorable against the MPL stress.

[0806] Rank Order

[0807] The benefit of having both anti-oxidants was demonstrated by monitoring: stability of Nivo by SEC and iCIEF, stability of rHuPH20 by looking at enzyme activity, and stability of PS80 by looking at PS80 levels. Ibis part of the study focused on a sub-set of samples focused on the need for both anti-oxidants (both, vs. just one vs. none). For each of these quality attributes, the formulation performance and rank ordering the best formulation to the worst (top to bottom) formulations is tabulated in Table 93.

TABLE 93
Study 2 - Quality attributes studied that were able to distinguish
formulations and the ranking of these formulations

| Quality | Nivo | Nivo | rHuPH20 | |
|---|---|---|---|---|
| Attribute | SEC % HMW | iCE % Acidic | Enzyme activity | PS80 stability |
| (best) | Met + DTPA | Met + DTPA | Met + DTPA | Met + DTPA = DTPA |
| Rank | DTPA | DTPA | DTPA | Met |
| Ordering | Met | Met | Met | None |
| (worst) | None | None | None | |

[0808] Nivo stability by SEC shows HMW increase in response to oxidation stress (MPL). The increase of HMW is minimized by the presence of anti-oxidants. Combination of Met and DTPA demonstrate better stability over DTPA alone, which outperformed Met, which outperformed formulations with neither DTPA nor Met. These results are consistent with Study 1.

[0809] Charge variants (above) show % acidic species increase to be highest with no DTPA nor Met. Having Met alone shows a slightly slower rate of increase for both thermal (35° C.) and oxidation (MPL) stress conditions. Having DTPA alone is comparable to having both DTPA and Met under thermal stress condition; but, under MPL condition a slight benefit is observed with both vs. DTPA alone.

[0810] rHuPH20 enzyme activity decreases in response to both thermal and oxidation stresses. The formulation composition benefit can be best observed for the oxidation stress (MPL). The enzyme activity was best preserved with the presence of both Met and DTPA. There was a measurable drop in enzyme activity relative to DTPA alone, which had a measurable drop relative to Met alone, which had a measurable drop relative to having no Met nor DTPA. This behavior was consistent for the thermal stress (35° C.) condition but the difference between DTPA alone and both (DTPA and Met) was smaller.

[0811] PS80 protection was observed for conditions that had a chelating agent (DTPA). Met did not protect PS80 from degrading.

[0812] Key results from investigating oxidation stress (MPL—combination of metal, peroxide, and 3 days of light in addition to thermal stress at 30° C.) with various combinations of formulations indicate that there was a benefit in the formulation having both 50 μM DTPA and 5 mM Met. The stability with just one of these antioxidants was less superior to having both chelating agent and sacrificial antioxidant. These results were consistent with Study 1 results.

[0813] Results—Study 3

[0814] In this study the aim was to understand the behavior of the molecule in different packaging components (the pre-filled syringe and the patch pump). In addition, there were a few formulation composition variations to the original to determine the ranges where benefits of this formulation can be observed. These include:
[0815] i. Histidine range of 15-100 mM. Study 2 showed increase in HMW at a low histidine concentration of 10 mM.
[0816] ii. Wider enzyme level from 0-10,000 U/mL vs. Study 2 only covered up to 5,000 U/mL.
[0817] iii. Wider protein concentration from 100-200 mg/mL. Study 2 covered up to 150 mg/mL.

[0818] This study also used these confirm formulation ranges in the case when enzyme is not present the formulation: pH: 5.2-6.5 His; Histidine: 15-100 mM; DTPA: 10-200 μM (Alt: 100 μM EDTA); Met: 1-20 mM (Alt: 10 mM Tryp); PS80: 0.01-0.1% w/v (Alt: PS20 and Poloxamer 0.2 mg/mL); Sugar: 10-400 mM Sucrose (Alt: 10% sorbitol and trehalose); Protein: 100-200 mg/mL; and Primary packaging: Vial, PFS and Patch pump.

[0819] Note that in this study the sorbitol and trehalose was correctly added in the TFF buffer which was missed in study 2. Due to the enzyme having no impact on HMW formation these results will be leveraged to understand the behavior with these alternate sugars with enzyme as well.

[0820] This resulted in 46 formulations where similar to study 2 formulations are studied one-variable at a time with all other factors at the target composition. In this study vials and patch pumps were studied primarily at 120 mg/mL and PFS were at 150 mg/mL Nivo target concentration. Target formulation composition was: 20 mM histidine, 250 mM sucrose, 50 μM DTPA, 5 mM Met, 2,000 U/mL rHuPH20, 0.05% w/v PS80 at pH 6.0 with air headspace. Note there were duplicate independent formulation preparations in the design for the center point condition and the condition with 50 μM DTPA and no Met.

[0821] In this study stability of Nivo was investigated using SEC and due to lack of particulate data from study 3 particulate analysis was done for select time points (MPL 3M, RT30 3M, 5C 6M and 25C 6M).

[0822] Size Exclusion Chromatography

[0823] Size exclusion chromatography was the primary tool used to monitor the stability of nivolumab.

[0824] Reproducibility and Enzyme Impact

[0825] Duplicate and independent formulation preparations were included in the design for the center point condition and 0 Met conditions as was done for study 2; but for study 3, the formulation did not include enzyme. The final HMW by SEC by stress and time point for the two formulations are tabulated for both study 2 and 3 in Table 94. This data shows the reproducibility across study 2 and 3 as well as across independent preparations with-in a study. The data are consistently within 0.1% HMW of each other.

TABLE 94
Study 2 and 3 - High molecular weight species by SEC for the
last time point in each of the stress condition studied for
the duplicate samples - center and 0 Met formulations. Center
formulation composition: 120 mg/mL Nivo, 20 mM Histidine,
250 mM Sucrose, 50 μM DTPA, 5 mM Met, 0.05% w/v PS80 at
pH 6.0. 0 Met composition: 120 mg/mL Nivo, 20 mM Histidine,
250 mM Sucrose, 50 μM DTPA, 0.05% w/v PS80 at pH 6.0.

| | | | % HMW by SEC | | | | |
|---|---|---|---|---|---|---|---|
| Study - | De- | Enzyme | 5° C. | 25° C. | 35° C. | RT30 | MPL |
| Form | scriptor | (U/mL) | 6 M | 6 M | 3 M | 3 M | 3 M |
| Study 3 - 12 | 0 Met | 0 | 1.0 | 1.5 | 1.8 | 1.3 | 1.9 |
| Study 3 - 13 | 0 Met | 0 | 1.0 | 1.5 | 1.8 | 1.3 | 1.8 |
| Study 2 - 21 | 0 Met | 2000 | 0.9 | 1.5 | 1.8 | 1.3 | 1.8 |
| Study 2 - 29 | 0 Met | 2000 | 0.9 | 1.5 | 1.8 | 1.3 | 1.8 |
| Study 3 - 10 | Center | 0 | 1.0 | 1.5 | 1.7 | 1.2 | 1.5 |
| Study 3 - 11 | Center | 0 | 1.0 | 1.4 | 1.7 | 1.2 | 1.5 |
| Study 3 - 5 | Center | 2000 | 1.0 | 1.5 | 1.7 | 1.2 | 1.5 |
| Study 2 - 15 | Center | 2000 | 0.9 | 1.4 | 1.7 | 1.2 | 1.5 |
| Study 2 - 28 | Center | 2000 | 0.9 | 1.4 | 1.8 | 1.3 | 1.6 |

[0826] This study as well as study 2 (Table 80) shows that there is no impact to Nivo stability with or with-out enzyme (Table 95) across the full enzyme level studied (0-10,000 U/mL). Throughout study 3 there are duplicate compositions tested with and with-out enzyme. These results have been very consistent (Table 95, Table 96, Table 97, Table 98, Table 99, Table 100, FIG. 25A, and FIG. 25B) and allow us to confidently translate learnings across condition with and with-out enzyme.

TABLE 95
Study 3 - High molecular weight species by SEC for the last time
point in each of the stress condition studied for varied enzyme
level. Formulation composition: 120 mg/mL Nivo, 20 mM Histidine,
250 mM Sucrose, 50 μM DTPA, 5 mM Met, 0.05% w/v PS80 at pH 6.0.

% HMW by SEC

| Enzyme | | 5° C. | 25° C. | 35° C. | RT30 | MPL |
|---|---|---|---|---|---|---|
| (U/mL) | T0 | 6 M | 6 M | 3 M | 3 M | 3 M |
| 0 | 0.8 | 1.0 | 1.5 | 1.7 | 1.2 | 1.5 |
| 0 | 0.8 | 1.0 | 1.4 | 1.7 | 1.2 | 1.5 |
| 2000 | 0.8 | 1.0 | 1.5 | 1.7 | 1.2 | 1.5 |
| 10000 | 0.8 | 1.0 | 1.5 | 1.7 | 1.2 | 1.5 |
| 10000 | 0.8 | 1.0 | 1.5 | 1.7 | 1.2 | 1.5 |

[0827] Primary Packaging

[0828] This study evaluated three different types of primary packaging: Vial, pre-filled syringe, and patch pump. The data for the various primary packaging is shown in Table 96 for a protein concentration of 120 mg/mL in the center point formulation composition: 20 mM Histidine, 250 mM Sucrose, 50 μM DTPA, 5 mM Met, 0.05% w/v PS80 at a pH of 6.0. There was no difference in HMW formation due to primary packaging differences.

TABLE 96
Study 3 - High molecular weight species by SEC for the
last time point in each of the stress condition studied
for the varied primary packaging at 120 mg/mL Nivo,
Formulation composition: 20 mM Histidine, 250 mM Sucrose,
50 μM DTPA, 5 mM Met, 0.05% w/v PS80 at pH 6.0

| | | % HMW by SEC | | | | | |
|---|---|---|---|---|---|---|---|
| Primary | Enzyme | | 5° C. | 25° C. | 35° C. | RT30 | MPL |
| Packaging | (U/mL) | T0 | 6 M | 6 M | 3 M | 3 M | 3 M |
| Vial | 0 | 0.8 | 1.0 | 1.5 | 1.7 | 1.2 | 1.5 |
| Vial | 0 | 0.8 | 1.0 | 1.4 | 1.7 | 1.2 | 1.5 |
| Vial | 2000 | 0.8 | 1.0 | 1.5 | 1.7 | 1.2 | 1.5 |
| PFS | 0 | 0.7 | 1.0 | 1.5 | 1.7 | 1.2 | 1.5 |
| PFS | 2000 | 0.8 | 1.0 | 1.5 | 1.7 | 1.2 | 1.5 |
| Patch Pump | 0 | 0.8 | 0.9 | 1.4 | N/A* | 1.2 | 1.4 |
| Patch Pump | 2000 | 0.8 | 0.9 | 1.4 | N/A* | 1.2 | 1.4 |

*Due to limited number of patch pumps limited data is available for the patch pump.

[0829] To understand if there are any liabilities due to the PFS components, two extra conditions were tested: one with a 1 ppm tungsten (W) spike and fill into a BD Neopack syringe with two times the silicone oil found in standard BD Neopack syringes. The high molecular weight values at the last time point for that stress condition are tabulated in Table 97 at the 150 mg/mL concentration again with 20 mM Histidine, 250 mM Sucrose, 50 μM DTPA, 5 mM Met, 0.05% w/v PS80 at a pH of 6.0. No increase in HMW was detected due to tungsten or silicone oil.

TABLE 97
Study 3 - High molecular weight species by SEC for the
last time point in each of the stress condition studied
for the use of PFS components at 150 mg/mL Nivo. Formulation
composition: 20 mM Histidine, 250 mM Sucrose, 50 μM DTPA,
5 mM Met, 0.05% w/v PS80 at pH 6.0

| | | | | % HMW by SEC | | | |
|---|---|---|---|---|---|---|---|
| | Enzyme | | 5° C. | 25° C. | 35° C. | RT30 | MPL |
| Descriptor | (U/mL) | T0 | 6 M | 6 M | 3 M | 3 M | 3 M |
| 0 | W spike PFS | 0.8 | 1.1 | 1.7 | 1.9 | 1.4 | 1.6 |
| 0 | 2X Si Oil PFS | 0.8 | 1.1 | 1.7 | 1.9 | 1.4 | 1.7 |
| 0 | PFS | 0.8 | 1.1 | 1.7 | 2.0 | 1.4 | 1.7 |
| 2000 | W spike PFS | 0.8 | 1.1 | 1.7 | 1.9 | 1.4 | 1.7 |
| 2000 | 2X Si Oil PFS | 0.8 | 1.1 | 1.7 | 1.9 | 1.4 | 1.7 |
| 2000 | PFS | 0.8 | 1.1 | 1.7 | 1.9 | 1.4 | 1.7 |

[0830] Protein Concentration

[0831] Primary packaging and enzyme levels do not impact HMW formation as discussed above. HMW formation across packaging and enzyme levels at the center point formulation composition at a range of protein concentrations from 100 to 200 mg/mL was tabulated together in Table 98. The center point formulation composition includes 20 mM Histidine, 250 mM Sucrose, 50 μM DTPA, 5 mM Met, 0.05% w/v PS80 at a pH of 6.0. Higher protein concentrations have shown higher HMW formation, and the was consistent with other studies at higher protein concentration and data from study 2 (Table 88).

TABLE 98
Study 3 - High molecular weight species by SEC for the last time
point in each of the stress condition studied for various protein
concentrations. Formulation composition: 20 mM Histidine, 250
mM Sucrose, 50 μM DTPA, 5 mM Met, 0.05% w/v PS80 at pH 6.0

| Primary | En- | Protein | | | | | | |
|---|---|---|---|---|---|---|---|---|
| Pack- | zyme | Conc | | % HMW by SEC | | | | |
| aging | (U/ | (mg/ | | 5° C. | 25° C. | 35° C. | RT30 | MPL |
| Primary | mL) | mL) | T0 | 6 M | 6 M | 3 M | 3 M | 3 M |
| Vial | 0 | 100 | 0.7 | 0.9 | 1.3 | 1.5 | | |
| Vial | 0 | 120 | 0.8 | 1.0 | 1.5 | 1.7 | 1.2 | 1.5 |
| Vial | 0 | 120 | 0.8 | 1.0 | 1.4 | 1.7 | 1.2 | 1.5 |
| Vial | 2000 | 120 | 0.8 | 1.0 | 1.5 | 1.7 | 1.2 | 1.5 |
| PFS | 0 | 120 | 0.7 | 1.0 | 1.5 | 1.7 | 1.2 | 1.5 |
| PFS | 2000 | 120 | 0.8 | 1.0 | 1.5 | 1.7 | 1.2 | 1.5 |
| PFS | 0 | 150 | 0.8 | 1.1 | 1.7 | 2.0 | 1.4 | 1.7 |
| PFS | 2000 | 150 | 0.8 | 1.1 | 1.7 | 1.9 | 1.4 | 1.7 |
| PFS | 0 | 165 | 0.8 | 1.1 | 1.8 | 2.1 | 1.5 | 1.8 |
| PFS | 2000 | 165 | 0.9 | 1.1 | 1.8 | 2.0 | 1.4 | 1.8 |
| Vial | 0 | 200 | 1.0 | 1.3 | 2.1 | 2.5 | | |
| PFS | 0 | 200 | 1.0 | 1.3 | 2.2 | 2.5 | | |
| PFS | 2000 | 200 | 1.0 | 1.3 | 2.2 | 2.5 | | |
| Vial | 2000 | 200 | 1.0 | 1.3 | 2.1 | 2.5 | | |

[0832] Alternate Excipients

[0833] In study 3 as an alternate sugar to 250 mM (8.6%) sucrose two alternate sugars: 10% sorbitol and 10% trehalose were studied. The results along with the results from use of the alternate surfactant to PS80 at 0.05% w/v, 0.05% w/v PS20 and 0.2 mg/mL poloxamer were studied and are tabulated in Table 99. These results tabulated against study 2 vs. study 3 where the difference here is study 2 had 2,000 U/mL of rHuPH20 and study 3 had no rHuPH20. The other excipients were at target composition: with the target formulation composition of 120 mg/mL Nivo, 20 mM Histidine, 250 mM Sucrose, 50 μM DTPA, 5 mM Met, 0.05% w/v PS80 at pH 6.0. There was an error during the preparation of the samples in study 2 for the formulations with trehalose and sorbitol for the alternate excipient so data with enzyme is not presented.

TABLE 99
Study 2 and 3 - High molecular weight species by SEC for
the last time point in each of the stress condition studied
for alternate excipients. Study 2 conditions have 2,000
U/mL of rHuPH20, study 3 have 0 U/mL of rHuPH20. Center
point composition: 120 mg/mL Nivo, 20 mM Histidine, 250
mM Sucrose, 50 μM DTPA, 5 mM Met, 0.05% w/v PS80, at pH 6.0.

| | % HMW by SEC | | | | | |
|---|---|---|---|---|---|---|
| Alternate | 5° C. 6 M | | 25° C. 6 M | | 35° C. 3 M | |
| Excipient | Study 2 | Study 3 | Study 2 | Study 3 | Study 2 | Study 3 |
| Center | 0.9 | 1.0 | 1.4 | 1.5 | 1.7 | 1.7 |
| Center | 0.9 | 1.0 | 1.4 | 1.4 | 1.8 | 1.7 |
| PS20 | 0.9 | 0.9 | 1.3 | 1.4 | 1.7 | 1.7 |
| Poloxamer | 0.9 | 1.0 | 1.3 | 1.5 | 1.7 | 1.7 |
| Sorbitol | | 1.3 | | 1.9 | | 2.1 |
| Trehalose | | 1.6 | | 2.2 | | 2.5 |
| Succinate | 1.3 | 1.5 | 3.2 | 3.2 | 6.8 | 5.7 |

[0834] As an alternate excipient, PS80 can be replaced by PS20 or poloxamer with minimal impact to stability. These results are consistent across the two studies.

[0835] Having histidine as the buffering agent was critical for Nivo stability and cannot be replaced with succinate. There was a substantial increase of HMW species with succinate buffer across all thermal stress conditions studied (5° C. 6M, 25° C. 6M, and 35° C. 3M), and this was again consistent across the two studies.

[0836] The sugar data suggest that sucrose had a superior stabilizing effect relative to sorbitol or trehalose.

[0837] As an alternate chelator to 50 μM DTPA, 100 μM EDTA was studied as was done in study 2. DTPA is a better chelating agent so a higher level of EDTA was studied here. Similarly, as an alternate sacrificial agent to 5 mM methionine, 10 mM tryptophan was studied. Since addition of a chelator and a sacrificial oxidizing agent can impact protection against oxidation these were studied under both thermal and oxidation stress conditions. The final HMW by SEC using these alternate excipients is tabulated in Table 100 for the final time point for that stress condition for both studies 2 and 3, where the difference here is study 2 had 2,000 U/mL of rHuPH20 and study 3 had no rHuPH20. The formulation composition included 120 mg/mL Nivo, 20 mM histidine, 250 mM sucrose, 0.05% w/v PS80 at pH 6.0.

[0838] Results from the two studies were comparable to each other. The exception is the condition with 0 DTPA and 0 Met—where there was a higher variability in how quickly this auto-catalytic HWM increase occurs. The tabulated % HMW values after 3 months with MPL stress clearly showed the unique benefit of having DTPA across the two studies, and that it was a superior chelator, compared to EDTA. Similarly, the data showed that Met is superior to Trp. % HMW increase was best controlled when formulated with 5 mM Met and 50 μM DTPA. These results were in agreement across the three studies.

[0839] These studies showed the unique and beneficial effect of histidine and sucrose, in combination with both Met and DTPA to Nivo stability.

TABLE 100
Study 2 and 3 - High molecular weight species by SEC for the last time point in each of the stress condition studied
for alternate excipients to DTPA and Met. Composition includes: 120 mg/mL Nivo, 20 mM Histidine, 250 mM Sucrose,
0.05% w/v PS80, at pH 6.0. Study 2 conditions have 2,000 U/mL of rHuPH20, study 3 have 0 U/mL of rHuPH20.

| | % HMW by SEC | | | | | | | | | |
|---|---|---|---|---|---|---|---|---|---|---|
| Alternate | 5° C. 6 M | | 25° C. 6 M | | 35° C. 3 M | | RT30 3 M | | MPL 3 M | |
| Excipient | Study 2 | Study 3 | Study 2 | Study 3 | Study 2 | Study 3 | Study 2 | Study 3 | Study 2 | Study 3 |
| 5 mM Met 50 μm DTPA | 0.9 | 1.0? | 1.4 | 1.5 | 1.7 | 1.7 | 1.2 | 1.2 | 1.5 | 1.5 |
| 5 mM Met 50 μm DTPA | 0.9 | 1.0? | 1.4 | 1.4 | 1.8 | 1.7 | 1.3 | 1.2 | 1.6 | 1.5 |
| 10 mM Trp 50 μm DTPA | 0.9 | 0.9 | 1.4 | 1.4 | 1.8 | 1.7 | 1.2 | 1.2 | 1.9 | 1.9 |
| 5 mM Met 100 μM EDTA | 0.9 | 1.0? | 1.5 | 1.5 | 1.8 | 1.8 | 1.3 | 1.3 | 2.1 | 2 |
| 0 mM Met 0 μM DTPA | 1.0? | 1.0? | 1.7 | 2.6 | 2.1 | 3.2 | 1.3 | 1.6 | 3.7 | 4 |
| 0 mM Met 50 μM DTPA | 0.9 | 1.0? | 1.5 | 1.5 | 1.8 | 1.8 | 1.3 | 1.3 | 1.8 | 1.8 |
| 0 mM Met 50 μM DTPA | 0.9 | 1.0? | 1.5 | 1.5 | 1.8 | 1.7 | 1.3 | 1.3 | 1.8 | 1.7 |

[0840] Excipient Ranges

[0841] Similar to study 2, various excipient ranges were studied in study 3. These results were consistent and in agreement with study 2 results, as was demonstrated by the key finding in study 2 where the impact of Met concentration had beneficial effects with increased concentration. The results across all three studies are shown in FIG. 25. Study 1 only evaluated 0 and 5 mM Met values, and study 2 focused on conditions with enzyme and study 3 focused on conditions with-out enzyme. Throughout this example, it has been demonstrated that the enzyme does not impact Nivo stability, and this finding was again demonstrated here.

[0842] A regression plot with all 3 studies is shown in FIG. 26. The three studies overlayed very well with each other. The linear approximation for 0 to 5 mM Methionine effect was 0.19% HMW at the center point composition: 120 mg/mL Nivo, 20 mM Histidine, 50 μM DTPA, 250 mM Sucrose, 0.05% w/v PS80 at pH 6.0.

[0843] In studies 2 and 3 the formulation composition ranges where stability was best maintained were as follows: pH: 5.2-6.5 His; Histidine: 15-100 mM; DTPA: 10-200 μM (Alt: 100 μM EDTA); Met: 1-20 mM (Alt: 10 mM Trp); rHuPH20: 0-5,000 U/mL; PS80: 0.01-0.1% w/v (Alt: PS20 0.05% w/v and Poloxamer 0.2 mg/mL); Sugar: 10-400 mM sucrose; Protein: 100-175 mg/mL; and Primary packaging: Vial, PFS, patch pump.

[0844] The center point formulation was: 120 mg/mL Nivo, 20 mM histidine, 250 mM sucrose, 5 mM Met, 50 μM DTPA, 0.05% w/v polysorbate 80 at pH 6.0 with 2,000 U/mL rHuPH20.

[0845] The pH range for this formulation was critical. Past a pH of 6.5, an increase in HMW was observed, and this was consistent across both studies 2 and 3. Formulating closer to pH 6 was advised based on the data.

[0846] Histidine as a buffer was critical in the formulation and had a stabilizing effect. Data from studies 2 and 3 were consistent. Succinate as a buffer did not demonstrate sufficient stability. Lower histidine concentrations led to higher HMW formation. Close to the 15 mM histidine level there was a cliff where stability decreases. In this study, up to 100 mM Histidine was studied but higher concentrations are expected to be stable.

[0847] An enzyme range between 0 to 10,000 U/mL has been studied and did not impact the stability of Nivo. This was consistent across studies 2 and 3.

[0848] PS80 levels between 0-0.1% w/v protected Nivo from HMW formation. Alternate surfactants PS20 (0.05% w/v) and poloxamer (0.2 mg/mL) demonstrated good protection for Nivo against HMW formation.

[0849] Nivo with sucrose levels between 10-400 mM demonstrated good stability. As an alternate excipient, trehalose and sorbitol showed higher HMW formation as compared to sucrose upon storage.

[0850] No impact to stability due to primary packaging was observed across the vial, PFS and patch pumps tested.

[0851] DTPA at a concentration range between 10-200 μM DTPA showed the same stability. Presence even at the low 10 μM level was sufficient to protect Nivo. No concentration dependence was observed across both studies 2 and 3.

[0852] Increased Met levels demonstrated acceptable stability within the range of 1-20 mM Met. The results were consistent across the studies (FIG. 26). For the case of Met, a statistical model was built. For the MPL stress condition, a linear regression was found to be significant for both studies 2 and 3. This showed that there was a clear benefit of having Met, and higher concentrations of Met were favorable against the MPL stress.

[0853] Particulates

[0854] Study 2 did not include particulate analysis. In study 3 particulate analysis was done for select timepoints (MPL 3M, RT30 3M, 5° C. 6M and 25° C. 6M). One sample had elevated particulate counts: a sample that had replaced histidine as a buffer with succinate-formulation 25. The HMW at 25 C for 6 months showed 6527 particles/mL ≥10 μm. The remaining samples had less than 130 particles/mL ≥10 μm, well below the USP <788> particle specification limits. These data showed concerns with switching to succinate as the buffering agent, even with all other formulation components are present.

[0855] Conclusions—Study 3

[0856] In study 3 different packaging components (pre-filled syringe and patch pump) were studied in addition to the vial and confirmed to perform well with the formulation.

[0857] The study also aimed at understanding the full range where stability was best maintained. The range found (from a combination of studies 2 and 3) are as follows: pH: 5.2-6.5 His; Histidine: 15-100 mM; DTPA: 10-200 μM (Alt: 100 μM EDTA); Met: 1-20 mM (Alt: 10 mM Trp); rHuPH20: 0-5,000 U/mL; PS80: 0.01-0.1% w/v (Alt: PS20 0.05% w/v and Poloxamer 0.2 mg/mL); Sugar: 10-400 mM sucrose; Protein: 100-175 mg/mL; and Primary packaging: Vial, PFS, patch pump. These ranges were the same for samples without enzyme.

[0858] The center point formulation was: 120 mg/mL Nivo for the vial and 150 mg/mL Nivo for the PFS, both contain 20 mM histidine, 250 mM sucrose, 5 mM Met, 50 μM DTPA, 0.05% w/v polysorbate 80 at pH 6.0 with 2,000 U/mL rHuPH20.

[0859] The pH range for this formulation was critical. Past a pH of 6.5, an increase in HMW was observed. Histidine as a buffer was critical in the formulation and had a stabilizing effect. Lower histidine concentrations led to higher HMW formation. Close to the 15 mM histidine level there was a cliff where stability decreases. In this study up to 100 mM Histidine was studied but higher concentrations are expected to be stable. DTPA presence was important in maintaining Nivo stability but no concentration dependence was observed. Increase in Met demonstrated higher protection for Nivo. There was a clear benefit of having Met, and higher concentrations of Met were favorable against the MPL stress.

[0860] Succinate as a buffer did not demonstrate sufficient stability for Nivo, forming both soluble aggregates (increase in HMW by SEC) and insoluble aggregates (particles by MFI). As an alternate stabilizing agent to sucrose, trehalose and sorbitol showed higher HMW formation upon storage. EDTA was less superior to DTPA, and Tryp was less superior to Met, even at higher concentrations. These studies showed the unique and beneficial effect of histidine and sucrose, in combination with both Met and DTPA to improve Nivo stability.

### Example 6—Probing Nivolumab-Excipient Interactions Using Nuclear Magnetic Resonance (NMR) Spectroscopy and Molecular Dynamics (MD)

[0861] NMR experiments and computational modeling have been performed to study Nivolumab-excipient interactions. Both approaches confirm there to be preferential protein-sugar interactions and show a stronger binding behavior for sucrose over mannitol, trehalose, glycine, sorbitol or succinate. The results may indicate a key molecular mechanism for the role of sugars in protein formulation.

[0862] Sugars are used to stabilize protein formulations and prevent the formation of protein aggregates. The goal of this example is better understand the mechanism for stabilization, determine why some sugars work better than others, and help guide formulation selection using a combination of nuclear magnetic resonance (NMR) and molecular dynamic (MD) methods. STD (Saturation Transfer Difference) NMR experiments were adopted to measure protein-ligand interactions and binding (see Angulo J. et al., Chem. Eur. J., 16:7803-7812 (2010), which is incorporated herein by reference in its entirety).

[0863] STD NMR experiments were performed on a NEO 700 Bruker NMR spectrometer using NMR data acquisition in ICONNMR at 283 K using the pulse sequence stddiff A recycle delay of 3-4.5 seconds was used. The NMR experiments were performed on Nivolumab samples (21.3 mg/ml concentration) with excipients glycine, mannitol, sucrose, trehalose, sorbitol, and succinate to access binding efficiency of each sugar with Nivolumab. The experiments were done at a series of excipient concentrations and fit the intensities of integrated peaks in the difference spectra to the Michaelis-Menten equation in order to assess whether the interactions between the excipient and the protein are specific or not. A specific interaction produces a saturation effect of the signal in the difference spectra.

[0864] Molecular Dynamics (MD) is an in silico approach to simulate the interactions between molecules at an atomistic level. Here, simulations were setup containing one Nivolumab Fab group, histidine buffer (15 mM equivalent) and excipient molecules (approx. 190 mM equivalent). Each excipient molecule was studied in a separate simulation. The simulation cells were setup using the MOE 2019.0101 software (Molecular Operating Environment 2019.0101; Chemical Computing Group Inc., Montreal, Canada, 2017) and the simulations were run using NAMD 2.12 (Phillips, J. C. et al., J. Comp. Chem, 26:1781-1802 (2005)).

[0865] The MD results were analyzed by first counting how many of the excipient molecules were within hydrogen bonding distance (<2A) from any atom of the Fab group. To distinguish tightly bound interaction poses of the excipients from more lightly bound ones, a clustering analysis was performed to group similar binding poses of each separate excipient and rank how frequently those poses were occupied in the simulation.

[0866] STD NMR results show that sucrose has the smallest Kd (dissociation constant) value, showing the strongest interaction to Nivolumab mAb with respect to trehalose, glycine and mannitol, sorbitol and succinate (FIG. 26).

[0867] FIG. 27 shows the average number of sugar molecules within 2 Å of the Nivolumab Fab group during the final 8 ns of the MD simulations. There is a significant difference seen between the different excipients, with the sucrose molecules interacting the most, and glycine the least. The overall trend for the number of interactions is sucrose >mannitol=trehalose >glycine. Sucrose molecules interact more than five-times more frequently than glycine, and around 50% more than mannitol, which has the next-most number of interactions. Qualitatively these results agree with the NMR results but because the STD-NMR experiments are sensitive to the strength of binding, not just the number of interactions, we further explored the strength of the interactions in the MD using a clustering analysis.

[0868] FIGS. 28A-28C show the locations of unique binding sites identified for each excipient by the clustering analysis. Visually, the difference between the excipients is clear, with far greater numbers of binding sites for mannitol (FIG. 28C), trehalose (FIG. 28E), and sucrose (FIG. 28D) than for sorbitol (FIG. 28B) and glycine (FIG. 28A), matching the trends in FIG. 27. FIGS. 29A-29B show the number of unique sites identified for each excipient, with FIG. 29A being weak-medium bound, and FIG. 29B strongly bound sites. Only sucrose, trehalose and sorbitol have strongly bound sites in the simulation, with trehalose and sorbitol having 1 such site, and sucrose 7. Further analysis of these sites has shown that in these strongly bound poses, there are 3-4 hydrogen bonds formed between the protein and excipient molecule, verifying that these poses are highly favorable and may be good candidates for the exchange sites identified by the STD-NMR results. It is of note that the strongly bound trehalose and sorbitol sites are in the constant domain of the Fab and close to the hinge region where there may be additional steric interactions that would prevent binding in the full mAb.

[0869] NMR results suggest that only sucrose strongly interacts/binds with Nivolumab in comparison to glycine, mannitol, sucrose, trehalose, sorbitol and succinate. MD results suggest that all the sugars studied interact to some extent, with preference for: sucrose >mannitol ≥trehalose >glycine >sorbitol. MD Cluster analysis shows that only sucrose and trehalose have strong binding interactions that are stabilized by non-specific and specific interactions with exposed residues on the Fab. The observation of strong binding sites only for sucrose correlates the NMR observations and MD results, and therefore the differential behavior of sucrose (Kamerzell, T. J. et al., Advanced Drug Delivery Reviews, 63:1118-1159 (2011)) making it a better excipient to stabilize proteins. The larger overall number of sucrose binding sites may explain why sucrose shows the best aggregation inhibition of the molecules tested.

### Example 7—Analysis of Additional Hyaluronidase Enzymes with Nivolumab

[0870] Nivolumab subcutaneous formulation includes hyaluronidase enzyme (rHuPH20). In the current study, compatibility of nivolumab and an alternate analog of rHuPH20 will be evaluated. The alternate enzyme variant will be placed on stability (e.g., at 5° C., 25° C., or 35° C.) in the current formulation composition: 120 mg/mL nivolumab in 20 mM histidine (pH 6.0), 250 mM sucrose, 0.05% polysorbate 80, 5 mM methionine, 50 μM pentetic acid and 2000 U/mL rHuPH20.

[0871] Various alternate analogs of rHuPH20 will be evaluated for combination with nivolumab subcutaneous formulation. Example alternate analoges that will be considered include, but are not limited to, enzymes having an amino acid sequence selected from the amino acid sequences set forth in SEQ ID NOs: 5-263. For example, the alternate analog of rHuPH20 having the amino acid sequence set forth in SEQ ID NO: 92 will be placed on stability in the current formulation composition: 120 mg/mL nivolumab in 20 mM histidine (pH 6.0), 250 mM sucrose, 0.05% polysorbate 80, 5 mM methionine, 50 μM pentetic acid and rHuPH20 (e.g., 2000 U/mL); wherein the rHuPH20 has the amino acid sequence set forth in SEQ ID NO: 92.

[0872] The following will be measured for each time point: pH, protein concentration, and SEC. Select samples will be tested for particulate matter (using HIAC) and enzyme activity. Sufficient sample will be kept for PS-80 analysis and analysis by CD-SDS and iCiEF, and will be tested if necessary. For each time point, 6 mL will be prepared for analysis.

[0873] A total of 22 vials will be filled with 3 mL per sample to cover the 11 time points. This will be done by preparing samples with 80 mL of formulation to account for losses during filtration using a 0.22 μM PES filter. The filtered drug product will be filled into depyrogenated 3-cc vials (Schott Type 1 glass) and stoppered with autoclaved 13-mm Daikyo stoppers (D-21-7S, Fluorotec-coated serum). Vials will be crimped and placed on stability in an upright position.

The application's sequence listing, which the Patent Office published only in electronic form, follows.

SEQUENCE LISTING (264 sequences)

SEQ ID NO: 1 - protein, 509 aa, Artificial Sequence
  rHuPH20
MGVLKFKHIFFRSFVKSSGVSQIVFTFLLIPCCLTLNFRAPPVIPNVPFLWAWNAPSEFCLGKFDEPLDMSLFSFIGSPRINATGQGVTIFYVDRLGYYPYIDSITGVTVNGGIPQKISLQDHLDKAKKDITFYMPVDNLGMAVIDWEEWRPTWARNWKPKDVYKNRSIELVQQQNVQLSLTEATEKAKQEFEKAGKDFLVETIKLGKLLRPNHLWGYYLFPDCYNHHYKKPGYNGSCFNVEIKRNDDLSWLWNESTALYPSIYLNTQQSPVAATLYVRNRVREAIRVSKIPDAKSPLPVFAYTRIVFTDQVLKFLSQDELVYTFGETVALGASGIVIWGTLSIMRSMKSCLLLDNYMETILNPYIINVTLAAKMCSQVLCQEQGVCIRKNWNSSDYLHLNPDNFAIQLEKGGKFTVRGKPTLEDLEQFSEKFYCSCYSTLSCKEKADVKDTDAVDVCIADGVCIDAFLKPPMETEEPQIFYNASPSTLSATMFIVSILFLIISSVASL

SEQ ID NO: 2 - protein, 113 aa, Artificial Sequence [sequence omitted]

SEQ ID NO: 3 - protein, 107 aa, artificial Sequence [sequence omitted]

SEQ ID NO: 4 - protein, 509 aa, artificial Sequence; identical to SEQ ID NO: 1
  rHuPH20

SEQ ID NO: 5 - protein, 447 aa, artificial Sequence [sequence omitted]

SEQ ID NO: 6 - protein, 446 aa, artificial Sequence
  Hyaluronidase Variant
LNFRAPPVIPNVPFLWAWNAPSEFCLGKFDEPLDMSLFSFIGSPRINATGQGVTIFYVDRLGYYPYIDSITGVTVNGGIPQKISLQDHLDKAKKDITFYMPVDNLGMAVIDWEEWRPTWARNWKPKDVYKNRSIELVQQQNVQLSLTEATEKAKQEFEKAGKDFLVETIKLGKLLRPNHLWGYYLFPDCYNHHYKKPGYNGSCFNVEIKRNDDLSWLWNESTALYPSIYLNTQQSPVAATLYVRNRVREAIRVSKIPDAKSPLPVFAYTRIVFTDQVLKFLSQDELVYTFGETVALGASGIVIWGTLSIMRSMKSCLLLDNYMETILNPYIINVTLAAKMCSQVLCQEQGVCIRKNWNSSDYLHLNPDNFAIQLEKGGKFTVRGKPTLEDLEQFSEKFYCSCYSTLSCKEKADVKDTDAVDVCIADGVCIDAFLKPPMETEEPQIF

SEQ ID NO: 7 - protein, 445 aa, artificial Sequence
  Hyaluronidase Variant
LNFRAPPVIPNVPFLWAWNAPSEFCLGKFDEPLDMSLFSFIGSPRINATGQGVTIFYVDRLGYYPYIDSITGVTVNGGIPQKISLQDHLDKAKKDITFYMPVDNLGMAVIDWEEWRPTWARNWKPKDVYKNRSIELVQQQNVQLSLTEATEKAKQEFEKAGKDFLVETIKLGKLLRPNHLWGYYLFPDCYNHHYKKPGYNGSCFNVEIKRNDDLSWLWNESTALYPSIYLNTQQSPVAATLYVRNRVREAIRVSKIPDAKSPLPVFAYTRIVFTDQVLKFLSQDELVYTFGETVALGASGIVIWGTLSIMRSMKSCLLLDNYMETILNPYIINVTLAAKMCSQVLCQEQGVCIRKNWNSSDYLHLNPDNFAIQLEKGGKFTVRGKPTLEDLEQFSEKFYCSCYSTLSCKEKADVKDTDAVDVCIADGVCIDAFLKPPMETEEPQI

SEQ ID NO: 8 - protein, 444 aa, artificial Sequence
  Hyaluronidase Variant
LNFRAPPVIPNVPFLWAWNAPSEFCLGKFDEPLDMSLFSFIGSPRINATGQGVTIFYVDRLGYYPYIDSITGVTVNGGIPQKISLQDHLDKAKKDITFYMPVDNLGMAVIDWEEWRPTWARNWKPKDVYKNRSIELVQQQNVQLSLTEATEKAKQEFEKAGKDFLVETIKLGKLLRPNHLWGYYLFPDCYNHHYKKPGYNGSCFNVEIKRNDDLSWLWNESTALYPSIYLNTQQSPVAATLYVRNRVREAIRVSKIPDAKSPLPVFAYTRIVFTDQVLKFLSQDELVYTFGETVALGASGIVIWGTLSIMRSMKSCLLLDNYMETILNPYIINVTLAAKMCSQVLCQEQGVCIRKNWNSSDYLHLNPDNFAIQLEKGGKFTVRGKPTLEDLEQFSEKFYCSCYSTLSCKEKADVKDTDAVDVCIADGVCIDAFLKPPMETEEPQ

SEQ ID NO: 9 - protein, 443 aa, artificial Sequence
  Hyaluronidase Variant
LNFRAPPVIPNVPFLWAWNAPSEFCLGKFDEPLDMSLFSFIGSPRINATGQGVTIFYVDRLGYYPYIDSITGVTVNGGIPQKISLQDHLDKAKKDITFYMPVDNLGMAVIDWEEWRPTWARNWKPKDVYKNRSIELVQQQNVQLSLTEATEKAKQEFEKAGKDFLVETIKLGKLLRPNHLWGYYLFPDCYNHHYKKPGYNGSCFNVEIKRNDDLSWLWNESTALYPSIYLNTQQSPVAATLYVRNRVREAIRVSKIPDAKSPLPVFAYTRIVFTDQVLKFLSQDELVYTFGETVALGASGIVIWGTLSIMRSMKSCLLLDNYMETILNPYIINVTLAAKMCSQVLCQEQGVCIRKNWNSSDYLHLNPDNFAIQLEKGGKFTVRGKPTLEDLEQFSEKFYCSCYSTLSCKEKADVKDTDAVDVCIADGVCIDAFLKPPMETEEP

SEQ ID NO: 10 - protein, 442 aa, artificial Sequence
  Hyaluronidase Variant
LNFRAPPVIPNVPFLWAWNAPSEFCLGKFDEPLDMSLFSFIGSPRINATGQGVTIFYVDRLGYYPYIDSITGVTVNGGIPQKISLQDHLDKAKKDITFYMPVDNLGMAVIDWEEWRPTWARNWKPKDVYKNRSIELVQQQNVQLSLTEATEKAKQEFEKAGKDFLVETIKLGKLLRPNHLWGYYLFPDCYNHHYKKPGYNGSCFNVEIKRNDDLSWLWNESTALYPSIYLNTQQSPVAATLYVRNRVREAIRVSKIPDAKSPLPVFAYTRIVFTDQVLKFLSQDELVYTFGETVALGASGIVIWGTLSIMRSMKSCLLLDNYMETILNPYIINVTLAAKMCSQVLCQEQGVCIRKNWNSSDYLHLNPDNFAIQLEKGGKFTVRGKPTLEDLEQFSEKFYCSCYSTLSCKEKADVKDTDAVDVCIADGVCIDAFLKPPMETEE

SEQ ID NO: 11 - protein, 483 aa, artificial Sequence
  Hyaluronidase Variant
MGVLKFKHIFFRSFVKSSGVSQIVFTFLLIPCCLTLNFRAPPVIPNVPFLWAWNAPSEFCLGKFDEPLDMSLFSFIGSPRINATGQGVTIFYVDRLGYYPYIDSITGVTVNGGIPQKISLQDHLDKAKKDITFYMPVDNLGMAVIDWEEWRPTWARNWKPKDVYKNRSIELVQQQNVQLSLTEATEKAKQEFEKAGKDFLVETIKLGKLLRPNHLWGYYLFPDCYNHHYKKPGYNGSCFNVEIKRNDDLSWLWNESTALYPSIYLNTQQSPVAATLYVRNRVREAIRVSKIPDAKSPLPVFAYTRIVFTDQVLKFLSQDELVYTFGETVALGASGIVIWGTLSIMRSMKSCLLLDNYMETILNPYIINVTLAAKMCSQVLCQEQGVCIRKNWNSSDYLHLNPDNFAIQLEKGGKFTVRGKPTLEDLEQFSEKFYCSCYSTLSCKEKADVKDTDAVDVCIADGVCIDAFLKPPMETEEPQIFYN

SEQ ID NO: 12 - protein, 432 aa, artificial Sequence
  Hyaluronidase Variant
LNFRAPPVIPNVPFLWAWNAPSEFCLGKFDEPLDMSLFSFIGSPRINATGQGVTIFYVDRLGYYPYIDSITGVTVNGGIPQKISLQDHLDKAKKDITFYMPVDNLGMAVIDWEEWRPTWARNWKPKDVYKNRSIELVQQQNVQLSLTEATEKAKQEFEKAGKDFLVETIKLGKLLRPNHLWGYYLFPDCYNHHYKKPGYNGSCFNVEIKRNDDLSWLWNESTALYPSIYLNTQQSPVAATLYVRNRVREAIRVSKIPDAKSPLPVFAYTRIVFTDQVLKFLSQDELVYTFGETVALGASGIVIWGTLSIMRSMKSCLLLDNYMETILNPYIINVTLAAKMCSQVLCQEQGVCIRKNWNSSDYLHLNPDNFAIQLEKGGKFTVRGKPTLEDLEQFSEKFYCSCYSTLSCKEKADVKDTDAVDVCIADGVCIDA

SEQ ID NO: 13 - protein, 448 aa, artificial Sequence
  Hyaluronidase Variant
LNFRAPPVIPNVPFLWAWNAPSEFCLGKFDEPLDMSLFSFIGSPRINATGQGVTIFYVDRLGYYPYIDSITGVTVNGGIPQKISLQDHLDKAKKDITFYMPVDNLGMAVIDWEEWRPTWARNWKPKDVYKNRSIELVQQQNVQLSLTEATEKAKQEFEKAGKDFLVETIKLGKLLRPNHLWGYYLFPDCYNHHYKKPGYNGSCFNVEIKRNDDLSWLWNESTALYPSIYLNTQQSPVAATLYVRNRVREAIRVSKIPDAKSPLPVFAYTRIVFTDQVLKFLSQDELVYTFGETVALGASGIVIWGTLSIMRSMKSCLLLDNYMETILNPYIINVTLAAKMCSQVLCQEQGVCIRKNWNSSDYLHLNPDNFAIQLEKGGKFTVRGKPTLEDLEQFSEKFYCSCYSTLSCKEKADVKDTDAVDVCIADGVCIDAFLKPPMETEEPQIFYN

SEQ ID NO: 14 - protein, 462 aa, artificial Sequence
  Hyaluronidase Variant
LNFRAPPVIPNVPFLWAWNAPSEFCLGKFDEPLDMSLFSFIGSPRINATGQGVTIFYVDRLGYYPYIDSITGVTVNGGIPQKISLQDHLDKAKKDITFYMPVDNLGMAVIDWEEWRPTWARNWKPKDVYKNRSIELVQQQNVQLSLTEATEKAKQEFEKAGKDFLVETIKLGKLLRPNHLWGYYLFPDCYNHHYKKPGYNGSCFNVEIKRNDDLSWLWNESTALYPSIYLNTQQSPVAATLYVRNRVREAIRVSKIPDAKSPLPVFAYTRIVFTDQVLKFLSQDELVYTFGETVALGASGIVIWGTLSIMRSMKSCLLLDNYMETILNPYIINVTLAAKMCSQVLCQEQGVCIRKNWNSSDYLHLNPDNFAIQLEKGGKFTVRGKPTLEDLEQFSEKFYCSCYSTLSCKEKADVKDTDAVDVCIADGVCIDAFLKPPMETEEPQIFYNASPSTLSATMFIVS

SEQ ID NO: 15 - protein, 460 aa, artificial Sequence
  Hyaluronidase Variant
LNFRAPPVIPNVPFLWAWNAPSEFCLGKFDEPLDMSLFSFIGSPRINATGQGVTIFYVDRLGYYPYIDSITGVTVNGGIPQKISLQDHLDKAKKDITFYMPVDNLGMAVIDWEEWRPTWARNWKPKDVYKNRSIELVQQQNVQLSLTEATEKAKQEFEKAGKDFLVETIKLGKLLRPNHLWGYYLFPDCYNHHYKKPGYNGSCFNVEIKRNDDLSWLWNESTALYPSIYLNTQQSPVAATLYVRNRVREAIRVSKIPDAKSPLPVFAYTRIVFTDQVLKFLSQDELVYTFGETVALGASGIVIWGTLSIMRSMKSCLLLDNYMETILNPYIINVTLAAKMCSQVLCQEQGVCIRKNWNSSDYLHLNPDNFAIQLEKGGKFTVRGKPTLEDLEQFSEKFYCSCYSTLSCKEKADVKDTDAVDVCIADGVCIDAFLKPPMETEEPQIFYNASPSTLSATMFI

SEQ ID NO: 16 - protein, 458 aa, artificial Sequence
  Hyaluronidase Variant
LNFRAPPVIPNVPFLWAWNAPSEFCLGKFDEPLDMSLFSFIGSPRINATGQGVTIFYVDRLGYYPYIDSITGVTVNGGIPQKISLQDHLDKAKKDITFYMPVDNLGMAVIDWEEWRPTWARNWKPKDVYKNRSIELVQQQNVQLSLTEATEKAKQEFEKAGKDFLVETIKLGKLLRPNHLWGYYLFPDCYNHHYKKPGYNGSCFNVEIKRNDDLSWLWNESTALYPSIYLNTQQSPVAATLYVRNRVREAIRVSKIPDAKSPLPVFAYTRIVFTDQVLKFLSQDELVYTFGETVALGASGIVIWGTLSIMRSMKSCLLLDNYMETILNPYIINVTLAAKMCSQVLCQEQGVCIRKNWNSSDYLHLNPDNFAIQLEKGGKFTVRGKPTLEDLEQFSEKFYCSCYSTLSCKEKADVKDTDAVDVCIADGVCIDAFLKPPMETEEPQIFYNASPSTLSATM

SEQ ID NO: 17 - protein, 456 aa, artificial Sequence
  Hyaluronidase Variant
LNFRAPPVIPNVPFLWAWNAPSEFCLGKFDEPLDMSLFSFIGSPRINATGQGVTIFYVDRLGYYPYIDSITGVTVNGGIPQKISLQDHLDKAKKDITFYMPVDNLGMAVIDWEEWRPTWARNWKPKDVYKNRSIELVQQQNVQLSLTEATEKAKQEFEKAGKDFLVETIKLGKLLRPNHLWGYYLFPDCYNHHYKKPGYNGSCFNVEIKRNDDLSWLWNESTALYPSIYLNTQQSPVAATLYVRNRVREAIRVSKIPDAKSPLPVFAYTRIVFTDQVLKFLSQDELVYTFGETVALGASGIVIWGTLSIMRSMKSCLLLDNYMETILNPYIINVTLAAKMCSQVLCQEQGVCIRKNWNSSDYLHLNPDNFAIQLEKGGKFTVRGKPTLEDLEQFSEKFYCSCYSTLSCKEKADVKDTDAVDVCIADGVCIDAFLKPPMETEEPQIFYNASPSTLSA

SEQ ID NO: 18 - protein, 461 aa, artificial Sequence
  Hyaluronidase Variant
LNFRAPPVIPNVPFLWAWNAPSEFCLGKFDEPLDMSLFSFIGSPRINATGQGVTIFYVDRLGYYPYIDSITGVTVNGGIPQKISLQDHLDKAKKDITFYMPVDNLGMAVIDWEEWRPTWARNWKPKDVYKNRSIELVQQQNVQLSLTEATEKAKQEFEKAGKDFLVETIKLGKLLRPNHLWGYYLFPDCYNHHYKKPGYNGSCFNVEIKRNDDLSWLWNESTALYPSIYLNTQQSPVAATLYVRNRVREAIRVSKIPDAKSPLPVFAYTRIVFTDQVLKFLSQDELVYTFGETVALGASGIVIWGTLSIMRSMKSCLLLDNYMETILNPYIINVTLAAKMCSQVLCQEQGVCIRKNWNSSDYLHLNPDNFAIQLEKGGKFTVRGKPTLEDLEQFSEKFYCSCYSTLSCKEKADVKDTDAVDVCIADGVCIDAFLKPPMETEEPQIFYNASPSTLSATMFIV

SEQ ID NO: 19 - protein, 459 aa, artificial Sequence
  Hyaluronidase Variant
LNFRAPPVIPNVPFLWAWNAPSEFCLGKFDEPLDMSLFSFIGSPRINATGQGVTIFYVDRLGYYPYIDSITGVTVNGGIPQKISLQDHLDKAKKDITFYMPVDNLGMAVIDWEEWRPTWARNWKPKDVYKNRSIELVQQQNVQLSLTEATEKAKQEFEKAGKDFLVETIKLGKLLRPNHLWGYYLFPDCYNHHYKKPGYNGSCFNVEIKRNDDLSWLWNESTALYPSIYLNTQQSPVAATLYVRNRVREAIRVSKIPDAKSPLPVFAYTRIVFTDQVLKFLSQDELVYTFGETVALGASGIVIWGTLSIMRSMKSCLLLDNYMETILNPYIINVTLAAKMCSQVLCQEQGVCIRKNWNSSDYLHLNPDNFAIQLEKGGKFTVRGKPTLEDLEQFSEKFYCSCYSTLSCKEKADVKDTDAVDVCIADGVCIDAFLKPPMETEEPQIFYNASPSTLSATMF

SEQ ID NO: 20 - protein, 457 aa, artificial Sequence
  Hyaluronidase Variant
LNFRAPPVIPNVPFLWAWNAPSEFCLGKFDEPLDMSLFSFIGSPRINATGQGVTIFYVDRLGYYPYIDSITGVTVNGGIPQKISLQDHLDKAKKDITFYMPVDNLGMAVIDWEEWRPTWARNWKPKDVYKNRSIELVQQQNVQLSLTEATEKAKQEFEKAGKDFLVETIKLGKLLRPNHLWGYYLFPDCYNHHYKKPGYNGSCFNVEIKRNDDLSWLWNESTALYPSIYLNTQQSPVAATLYVRNRVREAIRVSKIPDAKSPLPVFAYTRIVFTDQVLKFLSQDELVYTFGETVALGASGIVIWGTLSIMRSMKSCLLLDNYMETILNPYIINVTLAAKMCSQVLCQEQGVCIRKNWNSSDYLHLNPDNFAIQLEKGGKFTVRGKPTLEDLEQFSEKFYCSCYSTLSCKEKADVKDTDAVDVCIADGVCIDAFLKPPMETEEPQIFYNASPSTLSAT

SEQ ID NO: 21 - protein, 474 aa, artificial Sequence
  Hyaluronidase Variant
LNFRAPPVIPNVPFLWAWNAPSEFCLGKFDEPLDMSLFSFIGSPRINATGQGVTIFYVDRLGYYPYIDSITGVTVNGGIPQKISLQDHLDKAKKDITFYMPVDNLGMAVIDWEEWRPTWARNWKPKDVYKNRSIELVQQQNVQLSLTEATEKAKQEFEKAGKDFLVETIKLGKLLRPNHLWGYYLFPDCYNHHYKKPGYNGSCFNVEIKRNDDLSWLWNESTALYPSIYLNTQQSPVAATLYVRNRVREAIRVSKIPDAKSPLPVFAYTRIVFTDQVLKFLSQDELVYTFGETVALGASGIVIWGTLSIMRSMKSCLLLDNYMETILNPYIINVTLAAKMCSQVLCQEQGVCIRKNWNSSDYLHLNPDNFAIQLEKGGKFTVRGKPTLEDLEQFSEKFYCSCYSTLSCKEKADVKDTDAVDVCIADGVCIDAFLKPPMETEEPQIFYNASPSTLSATMFIVSILFLIISSVASL

SEQ ID NO: 22 - protein, 474 aa, artificial Sequence
  Hyaluronidase Variant
LNFRAPPVIPNVPFLWAWNAPSEFCLGKFDEPLDMSLFSFIGSPRINVTGQDVTIFYVDRLGYYPYIDSITGVTVNGGIPQKISLQDHLDKAKKDITFYMPVDNLGMAVIDWEEWRPTWARNWKPKDVYKNRSIELVQQQNVQLSLTEATEKAKQEFEKAGKDFLVETIKLGKLLRPNHLWGYYLFPDCYNHHYKKPGYNGSCFNVEIKRNDDLSWLWNESTALYPSIYLNTQQSPVAATLYVRNRVQEAIRVSKIPDAKSPLPVFVYTRIVFTDQVLKFLSQDELVYTFGETVALGASGIVIWGTLSIMRSMKSCLLLDNYMETILNPYIINVTLAAKMCSQVLCQEQGVCIRKNWNSSDYLHLNPDNFAIQLEKGGKFTVRGKPTLEDLEQFSEKFYCSCYSTLSCKEKADVKDTDAVDVCIADGVCIDAFLKPPMETEESQIFYNASPSTLSATMFIVSILFLIISSVASL

SEQ ID NO: 23 - protein, 477 aa, artificial Sequence
  Hyaluronidase Variant
LNFRAPPIIPNVPFLWAWNAPSEFCLGKFNEPLDMSLFTLMGSPRINITGQGVTIFYVDRLGYYPYIDLTTGVTVHGGIPQKVSLQDHLDKSKQDILFYMPVDNLGMAVIDWEEWRPTWARNWKPKDVYKNRSIELVQQQNVQLSLPQATDKAKQEFEKAGKDFMLETIKLGRSLRPNHLWGYYLFPDCYNHHYRKPGYNGSCFDVEIKRNDDLSWLWNESTALYPSIYLNTQQSVVVATLYVRNRVREAIRVSKIPDAKNPLPVFVYARLVFTDQVLKFLSREELVSTLGETVALGASGIVIWGSLSITRSMKSCLLLDTYMETILNPYIINVTLAAKMCSQVLCQEQGVCIRKDWNSSDYLHLNPDNFDIRLEKGGKFTVHGKPTVEDLEEFSEKFYCSCYTNLSCKEKADVKDTDAVDVCIADGVCIDASLKPPVETEGSPPIFYNTSSSTVSTTMFIWRLEVWDQGISRIGFF

SEQ ID NO: 24 - protein, 475 aa, artificial Sequence
  Hyaluronidase Variant
LNFRAPPIIPNVPFLWAWNAPSEFCLGKFNEPLDMSLFTLMGSPRINVTGQGVTIFYVDRLGYYPYIDLTTGVTVHGGIPQKVSLQDHLDKSKQDILFYMPVDNLGMAVIDWEEWRPTWARNWKPKDVYKNRSIELVQQQNVQLSLPQATDKAKQEFEKAGKDFMLETIKLGRSLRPNHLWGYYLFPDCYNHHYRKPGYNGSCFDVEIKRNDDLSWLWNESTALYPSIYLNTQQSVVVATLYVRNRVREAIRVSKIPDAKNPLPVFVYARLVFTDQVLKFLSREELVSTLGETVALGASGIVIWGSLSITRSMKSCLLLDTYMETILNPYIINVTLAAKMCSQVLCQEQGVCIRKDWNSSDYLHLNPDNFDIRLEKGGKFTVHGKPTVEDLEEFSEKFYCSCYTNLSCKEKADVKDTDAVDVCIADGVCIDASLKPPVETEGSPPIFYNTSSSTVSTTMFIVNILFLIISSVASL

SEQ ID NO: 25 - protein, 510 aa, artificial Sequence
  Hyaluronidase Variant
ANFRAPPVIPNVPFLWAWNAPTEFCLGKSGEPLDMSLFSLFGSPRKNKTGQGITIFYVDRLGYYPYIDPHTGAIVHGRIPQLGPLQQHLTKLRQEILYYMPKDNVGLAVIDWEEWLPTWLRNWKPKDIYRIKSIELVKSQHPQYNHSYATEKAKRDFEKAGKDFMEETLKLGRLLRPNHLWGYYLFPDCYNHHYDKPNLYKGSCFDIEKKRNDDLSWLWKESTALFPSVYLTSRARSATALSKLYVVRNRVHEAIRVSKIPDDKSPLPNFVYTRLVFTDQIFQFLSHHDLVYTIGEIVALGASGIVVWGSQSLARSMKSCLHLDNYMKTILNPYLINVTLAAKMCNQVLCQEQGVCTRKNWNPNDYLHLNPGNFAIQLGSNGTYKVDGKPTLTDLEQFSKNFQCSCYTNLNCKERTDMNNVRTVNVCAVENVCIDTNVGPQAVTYAPKEKKDVAHILSNTTSINSSTTMSLPFPRKHVSGCLLVLCMYSQYLNICYRLVAIGIQHGYYLK

SEQ ID NO: 26 - protein, 430 aa, artificial Sequence
  Hyaluronidase Variant
LNFRAPPVIPNVPFLWAWNAPSEFCLGKFDEPLDMSLFSFIGSPRINATGQGVTIFYVDRLGYYPYIDSITGVTVNGGIPQKISLQDHLDKAKKDITFYMPVDNLGMAVIDWEEWRPTWARNWKPKDVYKNRSIELVQQQNVQLSLTEATEKAKQEFEKAGKDFLVETIKLGKLLRPNHLWGYYLFPDCYNHHYKKPGYNGSCFNVEIKRNDDLSWLWNESTALYPSIYLNTQQSPVAATLYVRNRVREAIRVSKIPDAKSPLPVFAYTRIVFTDQVLKFLSQDELVYTFGETVALGASGIVIWGTLSIMRSMKSCLLLDNYMETILNPYIINVTLAAKMCSQVLCQEQGVCIRKNWNSSDYLHLNPDNFAIQLEKGGKFTVRGKPTLEDLEQFSEKFYCSCYSTLSCKEKADVKDTDAVDVCIADGVCI

SEQ ID NO: 27 - protein, 431 aa, artificial Sequence
  Hyaluronidase Variant
LNFRAPPVIPNVPFLWAWNAPSEFCLGKFDEPLDMSLFSFIGSPRINATGQGVTIFYVDRLGYYPYIDSITGVTVNGGIPQKISLQDHLDKAKKDITFYMPVDNLGMAVIDWEEWRPTWARNWKPKDVYKNRSIELVQQQNVQLSLTEATEKAKQEFEKAGKDFLVETIKLGKLLRPNHLWGYYLFPDCYNHHYKKPGYNGSCFNVEIKRNDDLSWLWNESTALYPSIYLNTQQSPVAATLYVRNRVREAIRVSKIPDAKSPLPVFAYTRIVFTDQVLKFLSQDELVYTFGETVALGASGIVIWGTLSIMRSMKSCLLLDNYMETILNPYIINVTLAAKMCSQVLCQEQGVCIRKNWNSSDYLHLNPDNFAIQLEKGGKFTVRGKPTLEDLEQFSEKFYCSCYSTLSCKEKADVKDTDAVDVCIADGVCID

SEQ ID NO: 28 - protein, 433 aa, artificial Sequence
  Hyaluronidase Variant
LNFRAPPVIPNVPFLWAWNAPSEFCLGKFDEPLDMSLFSFIGSPRINATGQGVTIFYVDRLGYYPYIDSITGVTVNGGIPQKISLQDHLDKAKKDITFYMPVDNLGMAVIDWEEWRPTWARNWKPKDVYKNRSIELVQQQNVQLSLTEATEKAKQEFEKAGKDFLVETIKLGKLLRPNHLWGYYLFPDCYNHHYKKPGYNGSCFNVEIKRNDDLSWLWNESTALYPSIYLNTQQSPVAATLYVRNRVREAIRVSKIPDAKSPLPVFAYTRIVFTDQVLKFLSQDELVYTFGETVALGASGIVIWGTLSIMRSMKSCLLLDNYMETILNPYIINVTLAAKMCSQVLCQEQGVCIRKNWNSSDYLHLNPDNFAIQLEKGGKFTVRGKPTLEDLEQFSEKFYCSCYSTLSCKEKADVKDTDAVDVCIADGVCIDAF

SEQ ID NO: 29 - protein, 434 aa, artificial Sequence
  Hyaluronidase Variant
LNFRAPPVIPNVPFLWAWNAPSEFCLGKFDEPLDMSLFSFIGSPRINATGQGVTIFYVDRLGYYPYIDSITGVTVNGGIPQKISLQDHLDKAKKDITFYMPVDNLGMAVIDWEEWRPTWARNWKPKDVYKNRSIELVQQQNVQLSLTEATEKAKQEFEKAGKDFLVETIKLGKLLRPNHLWGYYLFPDCYNHHYKKPGYNGSCFNVEIKRNDDLSWLWNESTALYPSIYLNTQQSPVAATLYVRNRVREAIRVSKIPDAKSPLPVFAYTRIVFTDQVLKFLSQDELVYTFGETVALGASGIVIWGTLSIMRSMKSCLLLDNYMETILNPYIINVTLAAKMCSQVLCQEQGVCIRKNWNSSDYLHLNPDNFAIQLEKGGKFTVRGKPTLEDLEQFSEKFYCSCYSTLSCKEKADVKDTDAVDVCIADGVCIDAFL

SEQ ID NO: 30 - protein, 435 aa, artificial Sequence
  Hyaluronidase Variant
LNFRAPPVIPNVPFLWAWNAPSEFCLGKFDEPLDMSLFSFIGSPRINATGQGVTIFYVDRLGYYPYIDSITGVTVNGGIPQKISLQDHLDKAKKDITFYMPVDNLGMAVIDWEEWRPTWARNWKPKDVYKNRSIELVQQQNVQLSLTEATEKAKQEFEKAGKDFLVETIKLGKLLRPNHLWGYYLFPDCYNHHYKKPGYNGSCFNVEIKRNDDLSWLWNESTALYPSIYLNTQQSPVAATLYVRNRVREAIRVSKIPDAKSPLPVFAYTRIVFTDQVLKFLSQDELVYTFGETVALGASGIVIWGTLSIMRSMKSCLLLDNYMETILNPYIINVTLAAKMCSQVLCQEQGVCIRKNWNSSDYLHLNPDNFAIQLEKGGKFTVRGKPTLEDLEQFSEKFYCSCYSTLSCKEKADVKDTDAVDVCIADGVCIDAFLK

SEQ ID NO: 31 - protein, 436 aa, artificial Sequence
  Hyaluronidase Variant
LNFRAPPVIPNVPFLWAWNAPSEFCLGKFDEPLDMSLFSFIGSPRINATGQGVTIFYVDRLGYYPYIDSITGVTVNGGIPQKISLQDHLDKAKKDITFYMPVDNLGMAVIDWEEWRPTWARNWKPKDVYKNRSIELVQQQNVQLSLTEATEKAKQEFEKAGKDFLVETIKLGKLLRPNHLWGYYLFPDCYNHHYKKPGYNGSCFNVEIKRNDDLSWLWNESTALYPSIYLNTQQSPVAATLYVRNRVREAIRVSKIPDAKSPLPVFAYTRIVFTDQVLKFLSQDELVYTFGETVALGASGIVIWGTLSIMRSMKSCLLLDNYMETILNPYIINVTLAAKMCSQVLCQEQGVCIRKNWNSSDYLHLNPDNFAIQLEKGGKFTVRGKPTLEDLEQFSEKFYCSCYSTLSCKEKADVKDTDAVDVCIADGVCIDAFLKP

SEQ ID NO: 32 - protein, 437 aa, artificial Sequence
  Hyaluronidase Variant
LNFRAPPVIPNVPFLWAWNAPSEFCLGKFDEPLDMSLFSFIGSPRINATGQGVTIFYVDRLGYYPYIDSITGVTVNGGIPQKISLQDHLDKAKKDITFYMPVDNLGMAVIDWEEWRPTWARNWKPKDVYKNRSIELVQQQNVQLSLTEATEKAKQEFEKAGKDFLVETIKLGKLLRPNHLWGYYLFPDCYNHHYKKPGYNGSCFNVEIKRNDDLSWLWNESTALYPSIYLNTQQSPVAATLYVRNRVREAIRVSKIPDAKSPLPVFAYTRIVFTDQVLKFLSQDELVYTFGETVALGASGIVIWGTLSIMRSMKSCLLLDNYMETILNPYIINVTLAAKMCSQVLCQEQGVCIRKNWNSSDYLHLNPDNFAIQLEKGGKFTVRGKPTLEDLEQFSEKFYCSCYSTLSCKEKADVKDTDAVDVCIADGVCIDAFLKPP

SEQ ID NO: 33 - protein, 438 aa, artificial Sequence
  Hyaluronidase Variant
LNFRAPPVIPNVPFLWAWNAPSEFCLGKFDEPLDMSLFSFIGSPRINATGQGVTIFYVDRLGYYPYIDSITGVTVNGGIPQKISLQDHLDKAKKDITFYMPVDNLGMAVIDWEEWRPTWARNWKPKDVYKNRSIELVQQQNVQLSLTEATEKAKQEFEKAGKDFLVETIKLGKLLRPNHLWGYYLFPDCYNHHYKKPGYNGSCFNVEIKRNDDLSWLWNESTALYPSIYLNTQQSPVAATLYVRNRVREAIRVSKIPDAKSPLPVFAYTRIVFTDQVLKFLSQDELVYTFGETVALGASGIVIWGTLSIMRSMKSCLLLDNYMETILNPYIINVTLAAKMCSQVLCQEQGVCIRKNWNSSDYLHLNPDNFAIQLEKGGKFTVRGKPTLEDLEQFSEKFYCSCYSTLSCKEKADVKDTDAVDVCIADGVCIDAFLKPPM

SEQ ID NO: 34 - protein, 439 aa, artificial Sequence
  Hyaluronidase Variant
LNFRAPPVIPNVPFLWAWNAPSEFCLGKFDEPLDMSLFSFIGSPRINATGQGVTIFYVDRLGYYPYIDSITGVTVNGGIPQKISLQDHLDKAKKDITFYMPVDNLGMAVIDWEEWRPTWARNWKPKDVYKNRSIELVQQQNVQLSLTEATEKAKQEFEKAGKDFLVETIKLGKLLRPNHLWGYYLFPDCYNHHYKKPGYNGSCFNVEIKRNDDLSWLWNESTALYPSIYLNTQQSPVAATLYVRNRVREAIRVSKIPDAKSPLPVFAYTRIVFTDQVLKFLSQDELVYTFGETVALGASGIVIWGTLSIMRSMKSCLLLDNYMETILNPYIINVTLAAKMCSQVLCQEQGVCIRKNWNSSDYLHLNPDNFAIQLEKGGKFTVRGKPTLEDLEQFSEKFYCSCYSTLSCKEKADVKDTDAVDVCIADGVCIDAFLKPPME

SEQ ID NO: 35 - protein, 440 aa, artificial Sequence
  Hyaluronidase Variant
LNFRAPPVIPNVPFLWAWNAPSEFCLGKFDEPLDMSLFSFIGSPRINATGQGVTIFYVDRLGYYPYIDSITGVTVNGGIPQKISLQDHLDKAKKDITFYMPVDNLGMAVIDWEEWRPTWARNWKPKDVYKNRSIELVQQQNVQLSLTEATEKAKQEFEKAGKDFLVETIKLGKLLRPNHLWGYYLFPDCYNHHYKKPGYNGSCFNVEIKRNDDLSWLWNESTALYPSIYLNTQQSPVAATLYVRNRVREAIRVSKIPDAKSPLPVFAYTRIVFTDQVLKFLSQDELVYTFGETVALGASGIVIWGTLSIMRSMKSCLLLDNYMETILNPYIINVTLAAKMCSQVLCQEQGVCIRKNWNSSDYLHLNPDNFAIQLEKGGKFTVRGKPTLEDLEQFSEKFYCSCYSTLSCKEKADVKDTDAVDVCIADGVCIDAFLKPPMET

SEQ ID NO: 36 - protein, 441 aa, artificial Sequence
  Hyaluronidase Variant
LNFRAPPVIPNVPFLWAWNAPSEFCLGKFDEPLDMSLFSFIGSPRINATGQGVTIFYVDRLGYYPYIDSITGVTVNGGIPQKISLQDHLDKAKKDITFYMPVDNLGMAVIDWEEWRPTWARNWKPKDVYKNRSIELVQQQNVQLSLTEATEKAKQEFEKAGKDFLVETIKLGKLLRPNHLWGYYLFPDCYNHHYKKPGYNGSCFNVEIKRNDDLSWLWNESTALYPSIYLNTQQSPVAATLYVRNRVREAIRVSKIPDAKSPLPVFAYTRIVFTDQVLKFLSQDELVYTFGETVALGASGIVIWGTLSIMRSMKSCLLLDNYMETILNPYIINVTLAAKMCSQVLCQEQGVCIRKNWNSSDYLHLNPDNFAIQLEKGGKFTVRGKPTLEDLEQFSEKFYCSCYSTLSCKEKADVKDTDAVDVCIADGVCIDAFLKPPMETE

SEQ ID NO: 37 - protein, 449 aa, artificial Sequence
  Hyaluronidase Variant
LNFRAPPVIPNVPFLWAWNAPSEFCLGKFDEPLDMSLFSFIGSPRINATGQGVTIFYVDRLGYYPYIDSITGVTVNGGIPQKISLQDHLDKAKKDITFYMPVDNLGMAVIDWEEWRPTWARNWKPKDVYKNRSIELVQQQNVQLSLTEATEKAKQEFEKAGKDFLVETIKLGKLLRPNHLWGYYLFPDCYNHHYKKPGYNGSCFNVEIKRNDDLSWLWNESTALYPSIYLNTQQSPVAATLYVRNRVREAIRVSKIPDAKSPLPVFAYTRIVFTDQVLKFLSQDELVYTFGETVALGASGIVIWGTLSIMRSMKSCLLLDNYMETILNPYIINVTLAAKMCSQVLCQEQGVCIRKNWNSSDYLHLNPDNFAIQLEKGGKFTVRGKPTLEDLEQFSEKFYCSCYSTLSCKEKADVKDTDAVDVCIADGVCIDAFLKPPMETEEPQIFYNA

SEQ ID NO: 38 - protein, 450 aa, artificial Sequence
  Hyaluronidase Variant
LNFRAPPVIPNVPFLWAWNAPSEFCLGKFDEPLDMSLFSFIGSPRINATGQGVTIFYVDRLGYYPYIDSITGVTVNGGIPQKISLQDHLDKAKKDITFYMPVDNLGMAVIDWEEWRPTWARNWKPKDVYKNRSIELVQQQNVQLSLTEATEKAKQEFEKAGKDFLVETIKLGKLLRPNHLWGYYLFPDCYNHHYKKPGYNGSCFNVEIKRNDDLSWLWNESTALYPSIYLNTQQSPVAATLYVRNRVREAIRVSKIPDAKSPLPVFAYTRIVFTDQVLKFLSQDELVYTFGETVALGASGIVIWGTLSIMRSMKSCLLLDNYMETILNPYIINVTLAAKMCSQVLCQEQGVCIRKNWNSSDYLHLNPDNFAIQLEKGGKFTVRGKPTLEDLEQFSEKFYCSCYSTLSCKEKADVKDTDAVDVCIADGVCIDAFLKPPMETEEPQIFYNAS

SEQ ID NO: 39 - protein, 451 aa, artificial Sequence
  Hyaluronidase Variant
LNFRAPPVIPNVPFLWAWNAPSEFCLGKFDEPLDMSLFSFIGSPRINATGQGVTIFYVDRLGYYPYIDSITGVTVNGGIPQKISLQDHLDKAKKDITFYMPVDNLGMAVIDWEEWRPTWARNWKPKDVYKNRSIELVQQQNVQLSLTEATEKAKQEFEKAGKDFLVETIKLGKLLRPNHLWGYYLFPDCYNHHYKKPGYNGSCFNVEIKRNDDLSWLWNESTALYPSIYLNTQQSPVAATLYVRNRVREAIRVSKIPDAKSPLPVFAYTRIVFTDQVLKFLSQDELVYTFGETVALGASGIVIWGTLSIMRSMKSCLLLDNYMETILNPYIINVTLAAKMCSQVLCQEQGVCIRKNWNSSDYLHLNPDNFAIQLEKGGKFTVRGKPTLEDLEQFSEKFYCSCYSTLSCKEKADVKDTDAVDVCIADGVCIDAFLKPPMETEEPQIFYNASP

SEQ ID NO: 40 - protein, 452 aa, artificial Sequence
  Hyaluronidase Variant
LNFRAPPVIPNVPFLWAWNAPSEFCLGKFDEPLDMSLFSFIGSPRINATGQGVTIFYVDRLGYYPYIDSITGVTVNGGIPQKISLQDHLDKAKKDITFYMPVDNLGMAVIDWEEWRPTWARNWKPKDVYKNRSIELVQQQNVQLSLTEATEKAKQEFEKAGKDFLVETIKLGKLLRPNHLWGYYLFPDCYNHHYKKPGYNGSCFNVEIKRNDDLSWLWNESTALYPSIYLNTQQSPVAATLYVRNRVREAIRVSKIPDAKSPLPVFAYTRIVFTDQVLKFLSQDELVYTFGETVALGASGIVIWGTLSIMRSMKSCLLLDNYMETILNPYIINVTLAAKMCSQVLCQEQGVCIRKNWNSSDYLHLNPDNFAIQLEKGGKFTVRGKPTLEDLEQFSEKFYCSCYSTLSCKEKADVKDTDAVDVCIADGVCIDAFLKPPMETEEPQIFYNASPS

SEQ ID NO: 41 - protein, 453 aa, artificial Sequence
  Hyaluronidase Variant
LNFRAPPVIPNVPFLWAWNAPSEFCLGKFDEPLDMSLFSFIGSPRINATGQGVTIFYVDRLGYYPYIDSITGVTVNGGIPQKISLQDHLDKAKKDITFYMPVDNLGMAVIDWEEWRPTWARNWKPKDVYKNRSIELVQQQNVQLSLTEATEKAKQEFEKAGKDFLVETIKLGKLLRPNHLWGYYLFPDCYNHHYKKPGYNGSCFNVEIKRNDDLSWLWNESTALYPSIYLNTQQSPVAATLYVRNRVREAIRVSKIPDAKSPLPVFAYTRIVFTDQVLKFLSQDELVYTFGETVALGASGIVIWGTLSIMRSMKSCLLLDNYMETILNPYIINVTLAAKMCSQVLCQEQGVCIRKNWNSSDYLHLNPDNFAIQLEKGGKFTVRGKPTLEDLEQFSEKFYCSCYSTLSCKEKADVKDTDAVDVCIADGVCIDAFLKPPMETEEPQIFYNASPST

SEQ ID NO: 42 - protein, 454 aa, artificial Sequence
  Hyaluronidase Variant
LNFRAPPVIPNVPFLWAWNAPSEFCLGKFDEPLDMSLFSFIGSPRINATGQGVTIFYVDRLGYYPYIDSITGVTVNGGIPQKISLQDHLDKAKKDITFYMPVDNLGMAVIDWEEWRPTWARNWKPKDVYKNRSIELVQQQNVQLSLTEATEKAKQEFEKAGKDFLVETIKLGKLLRPNHLWGYYLFPDCYNHHYKKPGYNGSCFNVEIKRNDDLSWLWNESTALYPSIYLNTQQSPVAATLYVRNRVREAIRVSKIPDAKSPLPVFAYTRIVFTDQVLKFLSQDELVYTFGETVALGASGIVIWGTLSIMRSMKSCLLLDNYMETILNPYIINVTLAAKMCSQVLCQEQGVCIRKNWNSSDYLHLNPDNFAIQLEKGGKFTVRGKPTLEDLEQFSEKFYCSCYSTLSCKEKADVKDTDAVDVCIADGVCIDAFLKPPMETEEPQIFYNASPSTL

SEQ ID NO: 43 - protein, 455 aa, artificial Sequence
  Hyaluronidase Variant
LNFRAPPVIPNVPFLWAWNAPSEFCLGKFDEPLDMSLFSFIGSPRINATGQGVTIFYVDRLGYYPYIDSITGVTVNGGIPQKISLQDHLDKAKKDITFYMPVDNLGMAVIDWEEWRPTWARNWKPKDVYKNRSIELVQQQNVQLSLTEATEKAKQEFEKAGKDFLVETIKLGKLLRPNHLWGYYLFPDCYNHHYKKPGYNGSCFNVEIKRNDDLSWLWNESTALYPSIYLNTQQSPVAATLYVRNRVREAIRVSKIPDAKSPLPVFAYTRIVFTDQVLKFLSQDELVYTFGETVALGASGIVIWGTLSIMRSMKSCLLLDNYMETILNPYIINVTLAAKMCSQVLCQEQGVCIRKNWNSSDYLHLNPDNFAIQLEKGGKFTVRGKPTLEDLEQFSEKFYCSCYSTLSCKEKADVKDTDAVDVCIADGVCIDAFLKPPMETEEPQIFYNASPSTLS

SEQ ID NO: 44 - protein, 463 aa, artificial Sequence
  Hyaluronidase Variant
LNFRAPPVIPNVPFLWAWNAPSEFCLGKFDEPLDMSLFSFIGSPRINATGQGVTIFYVDRLGYYPYIDSITGVTVNGGIPQKISLQDHLDKAKKDITFYMPVDNLGMAVIDWEEWRPTWARNWKPKDVYKNRSIELVQQQNVQLSLTEATEKAKQEFEKAGKDFLVETIKLGKLLRPNHLWGYYLFPDCYNHHYKKPGYNGSCFNVEIKRNDDLSWLWNESTALYPSIYLNTQQSPVAATLYVRNRVREAIRVSKIPDAKSPLPVFAYTRIVFTDQVLKFLSQDELVYTFGETVALGASGIVIWGTLSIMRSMKSCLLLDNYMETILNPYIINVTLAAKMCSQVLCQEQGVCIRKNWNSSDYLHLNPDNFAIQLEKGGKFTVRGKPTLEDLEQFSEKFYCSCYSTLSCKEKADVKDTDAVDVCIADGVCIDAFLKPPMETEEPQIFYNASPSTLSATMFIVSI

SEQ ID NO: 45 - protein, 464 aa, artificial Sequence
  Hyaluronidase Variant
LNFRAPPVIPNVPFLWAWNAPSEFCLGKFDEPLDMSLFSFIGSPRINATGQGVTIFYVDRLGYYPYIDSITGVTVNGGIPQKISLQDHLDKAKKDITFYMPVDNLGMAVIDWEEWRPTWARNWKPKDVYKNRSIELVQQQNVQLSLTEATEKAKQEFEKAGKDFLVETIKLGKLLRPNHLWGYYLFPDCYNHHYKKPGYNGSCFNVEIKRNDDLSWLWNESTALYPSIYLNTQQSPVAATLYVRNRVREAIRVSKIPDAKSPLPVFAYTRIVFTDQVLKFLSQDELVYTFGETVALGASGIVIWGTLSIMRSMKSCLLLDNYMETILNPYIINVTLAAKMCSQVLCQEQGVCIRKNWNSSDYLHLNPDNFAIQLEKGGKFTVRGKPTLEDLEQFSEKFYCSCYSTLSCKEKADVKDTDAVDVCIADGVCIDAFLKPPMETEEPQIFYNASPSTLSATMFIVSIL

SEQ ID NO: 46 - protein, 465 aa, artificial Sequence
  Hyaluronidase Variant
LNFRAPPVIPNVPFLWAWNAPSEFCLGKFDEPLDMSLFSFIGSPRINATGQGVTIFYVDRLGYYPYIDSITGVTVNGGIPQKISLQDHLDKAKKDITFYMPVDNLGMAVIDWEEWRPTWARNWKPKDVYKNRSIELVQQQNVQLSLTEATEKAKQEFEKAGKDFLVETIKLGKLLRPNHLWGYYLFPDCYNHHYKKPGYNGSCFNVEIKRNDDLSWLWNESTALYPSIYLNTQQSPVAATLYVRNRVREAIRVSKIPDAKSPLPVFAYTRIVFTDQVLKFLSQDELVYTFGETVALGASGIVIWGTLSIMRSMKSCLLLDNYMETILNPYIINVTLAAKMCSQVLCQEQGVCIRKNWNSSDYLHLNPDNFAIQLEKGGKFTVRGKPTLEDLEQFSEKFYCSCYSTLSCKEKADVKDTDAVDVCIADGVCIDAFLKPPMETEEPQIFYNASPSTLSATMFIVSILF

SEQ ID NO: 47 - protein, 474 aa, artificial Sequence
  Hyaluronidase Variant
LNFRAPPVIPNVAFLWAWNAPSEFCLGKFDEPLDMSLFSFIGSPRINATGQGVTIFYVDRLGYYPYIDSITGVTVNGGIPQKISLQDHLDKAKKDITFYMPVDNLGMAVIDWEEWRPTWARNWKPKDVYKNRSIELVQQQNVQLSLTEATEKAKQEFEKAGKDFLVETIKLGKLLRPNHLWGYYLFPDCYNHHYKKPGYNGSCFNVEIKRNDDLSWLWNESTALYPSIYLNTQQSPVAATLYVRNRVREAIRVSKIPDAKSPLPVFAYTRIVFTDQVLKFLSQDELVYTFGETVALGASGIVIWGTLSIMRSMKSCLLLDNYMETILNPYIINVTLAAKMCSQVLCQEQGVCIRKNWNSSDYLHLNPDNFAIQLEKGGKFTVRGKPTLEDLEQFSEKFYCSCYSTLSCKEKADVKDTDAVDVCIADGVCIDAFLKPPMETEEPQIFYNASPSTLSATMFIVSIWFLIISSVASL

SEQ ID NO: 48 - protein, 474 aa, artificial Sequence
  Hyaluronidase Variant
LNFRAPPVIPNAPFLWAWNAPSEFCLGKFDEPLDMSLFSFIGSPRINATGQGVTIFYVDRLGYYPYIDSITGVTVNGGIPQKISLQDHLDKAKKDITFYMPVDNLGMAVIDWEEWRPTWARNWKPKDVYKNRSIELVQQQNVQLSLTEATEKAKQEFEKAGKDFLVETIKLGKLLRPNHLWGYYLFPDCYNHHYKKPGYNGSCFNVEIKRNDDLSWLWNESTALYPSIYLNTQQSPVAATLYVRNRVREAIRVSKIPDAKSPLPVFAYTRIVFTDQVLKFLSQDELVYTFGETVALGASGIVIWGTLSIMRSMKSCLLLDNYMETILNPYIINVTLAAKMCSQVLCQEQGVCIRKNWNSSDYLHLNPDNFAIQLEKGGKFTVRGKPTLEDLEQFSEKFYCSCYSTLSCKEKADVKDTDAVDVCIADGVCIDAFLKPPMETEEPQIFYNASPSTLSATMFIVSILFLIISSVASL

SEQ ID NO: 49 - protein, 474 aa, artificial Sequence
  Hyaluronidase Variant
LNFRAPPVIPNVPFLWAWNAPSEFCLGKFDEPLDMSLFSLTGSPRINVTGQGVTIFYVDRLGYYPYIDSITGVTVNGGIPQKISLQDHLDKAKQDITFYMPVDNLGMAVIDWEEWRPTWARNWKPKDVYKNRSIELVQQQNVQLSLAEATEKAKQEFEKAGKDFMVETIKLGKLLRPNHLWGYYLFPDCYNHHYKKPGYNGSCFNVEIKRNDDLSWLWNESTALYPSIYLNTQQSPVAATLYVRNRVREAIRVSKIPDAKSPLPVFVYARIVFTDQVLKFLSRDELVYTLGETVALGASGIVIWGSLSIVRSMKSCLLLDNYMETILNPYIINVTLAAKMCSQVLCQEQGVCIRKDWNSSDYLHLNPDNFAIQLEKGGKFTVRGKPTPEDLEQFSEKFYCSCYSTLSCKEKADVKDTDAVDVCIADGVCIDAFLKPPKETEESQIFYNASPSTLSATMFIVSILFLIISSVVSL

SEQ ID NO: 50 - protein, 474 aa, artificial Sequence
  Hyaluronidase Variant
LNFRAPPIIPNVPFLWAWNAPSEFCLGKFDEPLDMSLFSLIGSPRINVTGQGVTIFYVDRLGYYPYIDPTTGAVVNGGIPQKIALQDHLDKVRKDIIFYMPVDNLGMGVIDWEEWRPTWARNWKPKDIYKNKSIEMVQQRNVQLNLTQATDIAKQEFEKAAKDFMLETIKLGKALRPNHLWGYYLFPDCYNHHYKKPDYNGSCFNIEIKRNNDLSWLWNESTALYPSIYLNTQQSAVAAMLYVRNRVQEAIRVSKTPNANSPLPVFVYARLVFTDQVLRFLSQDELVYTLGETVALGASGIVIWGSLSIMRSMKSCLLLDTYMETVLNPYIINTTLAAKMCSQVLCQEQGVCIRKDWNSSDYLHLNPDNFAIETEKGGKFTVRGKPTYEDLEQFSEKFYCSCYTSLSCKVKADVKDTDAVDVCIADGVCIDASLKPPKETEESSQIFYNPSSSTPSAAIFIVAILFFISCVVSL

SEQ ID NO: 51 - protein, 476 aa, artificial Sequence
  Hyaluronidase Variant
LNFRAPPIIPNMPFLWAWNAPSEFCLGKFDEPLDMSLFSLIGSPRINVTGQAVTIFYVDRLGYYPYIDSITGVTVNGGIPQKISLQDHLDKAKKDILFYMPVDNLGMAVIDWEEWRPTWARNWKPKDVYKNRSIELVQQQNVQLNLTEATEKAKQEFEKAGKDFMVETIKLGKLLRPNHLWGYYLFPDCYNHHYKKPGYNGSCFNVEIKRNDDLSWLWNESTALYPSIYLNTQQSPVAATLYVRNRVREAIRVSKIPDAKSPLPVFVYARIVFTDQVLKFLSQDELVYTFGETVALGASGIVIWGSLSIMRSMKSCLLLDNYMETILNPYIINVTLAAKMCSQVLCQEQGVCIRKDWNSSDYLHLNPDNFAIQLEKGGKFTVRGKPTLEDLEQFSEKFYCSCYSTLSCKEKADVKDTDAVDVCIADGVCIDAFLKPPMETEESQIFYNASPSTLSATMFIWRLEVWDQGISRMGFF

SEQ ID NO: 52 - protein, 474 aa, artificial Sequence
  Hyaluronidase Variant
LNFRAPPVIPNVPFLWAWNAPSEFCLGKFDEPLDTSLFSFIGSPRINVTGQDVTIFYVDRLGYYPYIDSITGVTVNGGIPQKISLQDHLDKAKKDITFYMPVDNLGMAVIDWEEWRPTWARNWKPKDVYKNRSIELVQQQNVQLSLTEATEKAKQEFEKAGKDFLVETIKLGKLLRPNHLWGYYLFPDCYNHHYKKPGYNGSCFNVEIKRNDDLSWLWNESTALYPSIYLNTQQSPVAATLYARNRVQEAIRVSKIPDAKSPLPVFVYTRIVFTDQVLKFLSQDELVYTFGETVALGASGIVIWGTLSIMRSMKSCLLLDNYMETILNPYIINVTLAAKMCSQVLCQEQGVCIRKNWNSSDYLHLNPDNFAIQLEKGGKFTVRGKPTLEDLEQFSEKFYCSCYSTLSCKEKADVKDTDAVDVCIADGVYIDAFLKPPMETEESQIFYNASPSTLSATMFIVSILFLIISSVASL

SEQ ID NO: 53 - protein, 455 aa, artificial Sequence
  Hyaluronidase Variant
LNFRAPPVIPNVPFLWAWNAPSEFCLGKFDEPLDMSLFSFIGSPRINATGQGVTIFYVDRLGYYPYIDSITGVTVNGGIPQKISLQDHLDKAKKDITFYMPVDNLGMAVIDWEEWRPTWARNWKPKDVYKNRSIELVQQQNVQLSLTEATEKAKQEFEKAGKDFLVETIKLGKLLRPNHLWGYYLFPDCYNHHYKKPGYNGSCFNVEIKRNDDLSWLWNESTALYPSIYLNTQQSPVAATLYVRNRVREAIRVSKIPDAKSPLPVFAYTRIVFTDQVLKFLSQDELVYTFGETVALGASGIVIWGTLSITRTKESCQAIKEYMDTTLGPYIINVTLAAKMCSQVLCQEQGVCIRKNWNSSDYLHLNPDNFAIQLEKGGKFTVRGKPTLEDLEQFSEKFYCSCYSTLSCKEKADVKDTDAVDVCIADGVCIDAFLKPPMETEEPQIFYNASPSTLS

SEQ ID NO: 54 - protein, 455 aa, artificial Sequence
  Hyaluronidase Variant
LNFRAPPVIPNVPFLWAWNAPSEFCLGKFDEPLDMSLFSFIGSPRINATGQGVTIFYVDRLGYYPYIDSITGVTVNGGIPQKISLQDHLDKAKKDITFYMPVDNLGMAVIDWEEWRPTWARNWKPKDVYKNRSIELVQQQNVQLSLTEATEKAKQEFEKAGKDFLVETIKLGKLLRPNHLWGYYLFPDCYNHHYKKPGYNGSCFNVEIKRNDDLSWLWNESTALYPSIYLNTQQSPVAATLYVRNRVREAIRVSKIPDAKSPLPVFAYTRIVFTDQVLKFLSQDELVYTFGETVALGASGIVIWGTLSITRTKESCQAIKEYMDTTLNPFILNVTSGALLCSQALCQEQGVCIRKNWNSSDYLHLNPDNFAIQLEKGGKFTVRGKPTLEDLEQFSEKFYCSCYSTLSCKEKADVKDTDAVDVCIADGVCIDAFLKPPMETEEPQIFYNASPSTLS

SEQ ID NO: 55 - protein, 455 aa, artificial Sequence
  Hyaluronidase Variant
LNFRAPPVIPNVPFLWAWNAPSEFCLGKFDEPLDMSLFSFIGSPRINATGQGVTIFYVDRLGYYPYIDSITGVTVNGGIPQKISLQDHLDKAKKDITFYMPVDNLGMAVIDWEEWRPTWARNWKPKDVYKNRSIELVQQQNVQLSLTEATEKAKQEFEKAGKDFLVETIKLGKLLRPNHLWGYYLFPDCYNHHYKKPGYNGSCFNVEIKRNDDLSWLWNESTALYPSIYLNTQQSPVAATLYVRNRVREAIRVSKIPDAKSPLPVFAYTRIVFTDQVLKFLSQDELVYTFGETVALGASGIVIWGTLSITRTKESCQAIKEYMDTTLGPFILNVTSGALLCSQALCQEQGVCIRKNWNSSDYLHLNPDNFAIQLEKGGKFTVRGKPTLEDLEQFSEKFYCSCYSTLSCKEKADVKDTDAVDVCIADGVCIDAFLKPPMETEEPQIFYNASPSTLS

SEQ ID NO: 56 - protein, 455 aa, artificial Sequence
  Hyaluronidase Variant
LNFRAPPVIPNVPFLWAWNAPSEFCLGKFDEPLDMSLFSFIGSPRINATGQGVTIFYVDRLGYYPYIDSITGVTVNGGIPQKISLQDHLDKAKKDITFYMPVDNLGMAVIDWEEWRPTWARNWKPKDVYKNRSIELVQQQNVQLSLTEATEKAKQEFEKAGKDFLVETIKLGKLLRPNHLWGYYLFPDCYNHHYKKPGYNGSCFNVEIKRNDDLSWLWNESTALYPSIYLNTQQSPVAATLYVRNRVREAIRVSKIPDAKSPLPVFAYTRIVFTDQVLKFLSQDELVYTFGETVALGASGIVIWVSWENTRTKESCQAIKEYMDTTLGPYIINVTLAAKMCSQVLCQEQGVCIRKNWNSSDYLHLNPDNFAIQLEKGGKFTVRGKPTLEDLEQFSEKFYCSCYSTLSCKEKADVKDTDAVDVCIADGVCIDAFLKPPMETEEPQIFYNASPSTLS

SEQ ID NO: 57 - protein, 455 aa, artificial Sequence
  Hyaluronidase Variant
LNFRAPPVIPNVPFLWAWNAPSEFCLGKFDEPLDMSLFSFIGSPRINATGQGVTIFYVDRLGYYPYIDSITGVTVNGGIPQKISLQDHLDKAKKDITFYMPVDNLGMAVIDWEEWRPTWARNWKPKDVYKNRSIELVQQQNVQLSLTEATEKAKQEFEKAGKDFLVETIKLGKLLRPNHLWGYYLFPDCYNHHYKKPGYNGSCFNVEIKRNDDLSWLWNESTALYPSIYLNTQQSPVAATLYVRNRVREAIRVSKIPDAKSPLPVFAYTRIVFTDQVLKFLSQDELVYTFGETVALGASGIVIWGTLSITRTKESCQAIKEYMDTTLNPYIINVTLAAKMCSQVLCQEQGVCIRKNWNSSDYLHLNPDNFAIQLEKGGKFTVRGKPTLEDLEQFSEKFYCSCYSTLSCKEKADVKDTDAVDVCIADGVCIDAFLKPPMETEEPQIFYNASPSTLS

SEQ ID NO: 58 - protein, 455 aa, artificial Sequence
  Hyaluronidase Variant
LNFRAPPVIPNVPFLWAWNAPSEFCLGKFDEPLDMSLFSFIGSPRINATGQGVTIFYVDRLGYYPYIDSITGVTVNGGIPQKISLQDHLDKAKKDITFYMPVDNLGMAVIDWEEWRPTWARNWKPKDVYKNRSIELVQQQNVQLSLTEATEKAKQEFEKAGKDFLVETIKLGKLLRPNHLWGYYLFPDCYNHHYKKPGYNGSCFNVEIKRNDDLSWLWNESTALYPSIYLNTQQSPVAATLYVRNRVREAIRVSKIPDAKSPLPVFAYTRIVFTDQVLKFLSQDELVYTFGETVALGASGIVIWVSWENTRTKESCQAIKEYMDTTLNPYIINVTLAAKMCSQVLCQEQGVCIRKNWNSSDYLHLNPDNFAIQLEKGGKFTVRGKPTLEDLEQFSEKFYCSCYSTLSCKEKADVKDTDAVDVCIADGVCIDAFLKPPMETEEPQIFYNASPSTLS

SEQ ID NO: 59 - protein, 455 aa, artificial Sequence
  Hyaluronidase Variant
LNFRAPPVIPNVPFLWAWNAPSEFCLGKFDEPLDMSLFSFIGSPRINATGQGVTIFYVDRLGYYPYIDSITGVTVNGGIPQKISLQDHLDKAKKDITFYMPVDNLGMAVIDWEEWRPTWARNWKPKDVYKNRSIELVQQQNVQLSLTEATEKAKQEFEKAGKDFLVETIKLGKLLRPNHLWGYYLFPDCYNHHYKKPGYNGSCFNVEIKRNDDLSWLWNESTALYPSIYLNTQQSPVAATLYVRNRVREAIRVSKIPDAKSPLPVFAYTRIVFTDQVLKFLSQDELVYTFGETVALGASGIVIWGTLSNTRTKESCQAIKEYMDTTLNPYIINVTLAAKMCSQVLCQEQGVCIRKNWNSSDYLHLNPDNFAIQLEKGGKFTVRGKPTLEDLEQFSEKFYCSCYSTLSCKEKADVKDTDAVDVCIADGVCIDAFLKPPMETEEPQIFYNASPSTLS

SEQ ID NO: 60 - protein, 455 aa, artificial Sequence
  Hyaluronidase Variant
LNFRAPPVIPNVPFLWAWNAPSEFCLGKFDEPLDMSLFSFIGSPRINATGQGVTIFYVDRLGYYPYIDSITGVTVNGGIPQKISLQDHLDKAKKDITFYMPVDNLGMAVIDWEEWRPTWARNWKPKDVYKNRSIELVQQQNVQLSLTEATEKAKQEFEKAGKDFLVETIKLGKLLRPNHLWGYYLFPDCYNHHYKKPGYNGSCFNVEIKRNDDLSWLWNESTALYPSIYLNTQQSPVAATLYVRNRVREAIRVSKIPDAKSPLPVFAYTRIVFTDQVLKFLSQDELVYTFGETVALGASGIVIWGTLENTRTKESCQAIKEYMDTTLNPYIINVTLAAKMCSQVLCQEQGVCIRKNWNSSDYLHLNPDNFAIQLEKGGKFTVRGKPTLEDLEQFSEKFYCSCYSTLSCKEKADVKDTDAVDVCIADGVCIDAFLKPPMETEEPQIFYNASPSTLS

SEQ ID NO: 61 - protein, 455 aa, artificial Sequence
  Hyaluronidase Variant
LNFRAPPVIPNVPFLWAWNAPSEFCLGKFDEPLDMSLFSFIGSPRINATGQGVTIFYVDRLGYYPYIDSITGVTVNGGIPQKISLQDHLDKAKKDITFYMPVDNLGMAVIDWEEWRPTWARNWKPKDVYKNRSIELVQQQNVQLSLTEATEKAKQEFEKAGKDFLVETIKLGKLLRPNHLWGYYLFPDCYNHHYKKPGYNGSCFNVEIKRNDDLSWLWNESTALYPSIYLNTQQSPVAATLYVRNRVREAIRVSKIPDAKSPLPVFAYTRIVFTDQVLKFLSQDELVYTFGETVALGASGIVIWGTWENTRTKESCQAIKEYMDTTLNPYIINVTLAAKMCSQVLCQEQGVCIRKNWNSSDYLHLNPDNFAIQLEKGGKFTVRGKPTLEDLEQFSEKFYCSCYSTLSCKEKADVKDTDAVDVCIADGVCIDAFLKPPMETEEPQIFYNASPSTLS

SEQ ID NO: 62 - protein, 455 aa, artificial Sequence
  Hyaluronidase Variant
LNFRAPPVIPNVPFLWAWNAPSEFCLGKFDEPLDMSLFSFIGSPRINATGQGVTIFYVDRLGYYPYIDSITGVTVNGGIPQKISLQDHLDKAKKDITFYMPVDNLGMAVIDWEEWRPTWARNWKPKDVYKNRSIELVQQQNVQLSLTEATEKAKQEFEKAGKDFLVETIKLGKLLRPNHLWGYYLFPDCYNHHYKKPGYNGSCFNVEIKRNDDLSWLWNESTALYPSIYLNTQQSPVAATLYVRNRVREAIRVSKIPDAKSPLPVFAYTRIVFTDQVLKFLSQDELVYTFGETVALGASGIVIWGTLSITRTKESCQAIKEYMDTTLNPFILNVTLAAKMCSQVLCQEQGVCIRKNWNSSDYLHLNPDNFAIQLEKGGKFTVRGKPTLEDLEQFSEKFYCSCYSTLSCKEKADVKDTDAVDVCIADGVCIDAFLKPPMETEEPQIFYNASPSTLS

SEQ ID NO: 63 - protein, 455 aa, artificial Sequence
  Hyaluronidase Variant
LNFRAPPVIPNVPFLWAWNAPSEFCLGKFDEPLDMSLFSFIGSPRINATGQGVTIFYVDRLGYYPYIDSITGVTVNGGIPQKISLQDHLDKAKKDITFYMPVDNLGMAVIDWEEWRPTWARNWKPKDVYKNRSIELVQQQNVQLSLTEATEKAKQEFEKAGKDFLVETIKLGKLLRPNHLWGYYLFPDCYNHHYKKPGYNGSCFNVEIKRNDDLSWLWNESTALYPSIYLNTQQSPVAATLYVRNRVREAIRVSKIPDAKSPLPVFAYTRIVFTDQVLKFLSQDELVYTFGETVALGASGIVIWGTLSITRTKESCQAIKEYMDTTLNPFILNVTSGAKMCSQVLCQEQGVCIRKNWNSSDYLHLNPDNFAIQLEKGGKFTVRGKPTLEDLEQFSEKFYCSCYSTLSCKEKADVKDTDAVDVCIADGVCIDAFLKPPMETEEPQIFYNASPSTLS

SEQ ID NO: 64 - protein, 453 aa, artificial Sequence
  Hyaluronidase Variant
FRAPPVIPNVPFLWAWNAPSEFCLGKFDEPLDMSLFSFIGSPRINATGQGVTIFYVDRLGYYPYIDSITGVTVNGGIPQKISLQDHLDKAKKDITFYMPVDNLGMAVIDWEEWRPTWARNWKPKDVYKNRSIELVQQQNVQLSLTEATEKAKQEFEKAGKDFLVETIKLGKLLRPNHLWGYYLFPDCYNHHYKKPGYNGSCFNVEIKRNDDLSWLWNESTALYPSIYLNTQQSPVAATLYVRNRVREAIRVSKIPDAKSPLPVFAYTRIVFTDQVLKFLSQDELVYTFGETVALGASGIVIWGTLSITRTKESCQAIKEYMDTTLNPYIINVTLAAKMCSQVLCQEQGVCIRKNWNSSDYLHLNPDNFAIQLEKGGKFTVRGKPTLEDLEQFSEKFYCSCYSTLSCKEKADVKDTDAVDVCIADGVCIDAFLKPPMETEEPQIFYNASPSTLS

SEQ ID NO: 65 - protein, 430 aa, artificial Sequence
  Hyaluronidase Variant
LNFRAPPVIPNVPFLWAWNAPSEFCLGKFDEPLDMSLFSFIGSPRINATGQGVTIFYVDRLGYYPYIDSITGVTVNGGIPQKISLQDHLDKAKKDITFYMPVDNLGMAVIDWEEWRPTWARNWKPKDVYKNRSIELVQQQNVQLSLTEATEKAKQEFEKAGKDFLVETIKLGKLLRPNHLWGYYLFPDCYNHHYKKPGYNGSCFNVEIKRNDDLSWLWNESTALYPSIYLNTQQSPVAATLYVRNRVREAIRVSKIPDAKSPLPVFAYTRIVFTDQVLKFLSQDELVYTFGETVALGASGIVIWGTLSITRTKESCQAIKEYMDTTLNPYIINVTLAAKMCSQVLCQEQGVCIRKNWNSSDYLHLNPDNFAIQLEKGGKFTVRGKPTLEDLEQFSEKFYCSCYSTLSCKEKADVKDTDAVDVCIADGVCI

SEQ ID NO: 66 - protein, 433 aa, artificial Sequence
  Hyaluronidase Variant
LNFRAPPVIPNVPFLWAWNAPSEFCLGKFDEPLDMSLFSFIGSPRINATGQGVTIFYVDRLGYYPYIDSITGVTVNGGIPQKISLQDHLDKAKKDITFYMPVDNLGMAVIDWEEWRPTWARNWKPKDVYKNRSIELVQQQNVQLSLTEATEKAKQEFEKAGKDFLVETIKLGKLLRPNHLWGYYLFPDCYNHHYKKPGYNGSCFNVEIKRNDDLSWLWNESTALYPSIYLNTQQSPVAATLYVRNRVREAIRVSKIPDAKSPLPVFAYTRIVFTDQVLKFLSQDELVYTFGETVALGASGIVIWGTLSITRTKESCQAIKEYMDTTLNPYIINVTLAAKMCSQVLCQEQGVCIRKNWNSSDYLHLNPDNFAIQLEKGGKFTVRGKPTLEDLEQFSEKFYCSCYSTLSCKEKADVKDTDAVDVCIADGVCIDAF

SEQ ID NO: 67 - protein, 436 aa, artificial Sequence
  Hyaluronidase Variant
LNFRAPPVIPNVPFLWAWNAPSEFCLGKFDEPLDMSLFSFIGSPRINATGQGVTIFYVDRLGYYPYIDSITGVTVNGGIPQKISLQDHLDKAKKDITFYMPVDNLGMAVIDWEEWRPTWARNWKPKDVYKNRSIELVQQQNVQLSLTEATEKAKQEFEKAGKDFLVETIKLGKLLRPNHLWGYYLFPDCYNHHYKKPGYNGSCFNVEIKRNDDLSWLWNESTALYPSIYLNTQQSPVAATLYVRNRVREAIRVSKIPDAKSPLPVFAYTRIVFTDQVLKFLSQDELVYTFGETVALGASGIVIWGTLSITRTKESCQAIKEYMDTTLNPYIINVTLAAKMCSQVLCQEQGVCIRKNWNSSDYLHLNPDNFAIQLEKGGKFTVRGKPTLEDLEQFSEKFYCSCYSTLSCKEKADVKDTDAVDVCIADGVCIDAFLKP

SEQ ID NO: 68 - protein, 452 aa, artificial Sequence
  Hyaluronidase Variant
FRGPLLPNRPFLWAWNAPSEFCLGKFDEPLDMSLFSFIGSPRINATGQGVTIFYVDRLGYYPYIDSITGVTVNGGIPQKISLQDHLDKAKKDITFYMPVDNLGMAVIDWEEWRPTWARNWKPKDVYKNRSIELVQQQNVQLSLTEATEKAKQEFEKAGKDFLVETIKLGKLLRPNHLWGYYLFPDCYNHHYKKPGYNGSCFNVEIKRNDDLSWLWNESTALYPSIYLNTQQSPVAATLYVRNRVREAIRVSKIPDAKSPLPVFAYTRIVFTDQVLKFLSQDELVYTFGETVALGASGIVIWGTLSITRTKESCQAIKEYMDTTLNPYIINVTLAAKMCSQVLCQEQGVCIRKNWNSSDYLHLNPDNFAIQLEKGGKFTVRGKPTLEDLEQFSEKFYCSCYSTLSCKEKADVKDTDAVDVCIADGVCIDAFLKPPMETEEPQIFYNASPSTLS

SEQ ID NO: 69 - protein, 452 aa, artificial Sequence
  Hyaluronidase Variant
FRGPLLPNRPFTTVWNAPSEFCLGKFDEPLDMSLFSFIGSPRINATGQGVTIFYVDRLGYYPYIDSITGVTVNGGIPQKISLQDHLDKAKKDITFYMPVDNLGMAVIDWEEWRPTWARNWKPKDVYKNRSIELVQQQNVQLSLTEATEKAKQEFEKAGKDFLVETIKLGKLLRPNHLWGYYLFPDCYNHHYKKPGYNGSCFNVEIKRNDDLSWLWNESTALYPSIYLNTQQSPVAATLYVRNRVREAIRVSKIPDAKSPLPVFAYTRIVFTDQVLKFLSQDELVYTFGETVALGASGIVIWGTLSITRTKESCQAIKEYMDTTLNPYIINVTLAAKMCSQVLCQEQGVCIRKNWNSSDYLHLNPDNFAIQLEKGGKFTVRGKPTLEDLEQFSEKFYCSCYSTLSCKEKADVKDTDAVDVCIADGVCIDAFLKPPMETEEPQIFYNASPSTLS

SEQ ID NO: 70 - protein, 433 aa, artificial Sequence
  Hyaluronidase Variant
FRAPPVIPNVPFLWAWNAPSEFCLGKFDEPLDMSLFSFIGSPRINATGQGVTIFYVDRLGYYPYIDSITGVTVNGGIPQKISLQDHLDKAKKDITFYMPVDNLGMAVIDWEEWRPTWARNWKPKDVYKNRSIELVQQQNVQLSLTEATEKAKQEFEKAGKDFLVETIKLGKLLRPNHLWGYYLFPDCYNHHYKKPGYNGSCFNVEIKRNDDLSWLWNESTALYPSIYLNTQQSPVAATLYVRNRVREAIRVSKIPDAKSPLPVFAYTRIVFTDQVLKFLSQDELVYTFGETVALGASGIVIWGTWENTRTKESCQAIKEYMDTTLNPYIINVTLAAKMCSQVLCQEQGVCIRKNWNSSDYLHLNPDNFAIQLEKGGKFTVRGKPTLEDLEQFSEKFYCSCYSTLSCKEKADVKDTDAVDVCIADGVCIDAFLK

SEQ ID NO: 71 - protein, 431 aa, artificial Sequence
  Hyaluronidase Variant
FRAPPVIPNVPFLWAWNAPSEFCLGKFDEPLDMSLFSFIGSPRINATGQGVTIFYVDRLGYYPYIDSITGVTVNGGIPQKISLQDHLDKAKKDITFYMPVDNLGMAVIDWEEWRPTWARNWKPKDVYKNRSIELVQQQNVQLSLTEATEKAKQEFEKAGKDFLVETIKLGKLLRPNHLWGYYLFPDCYNHHYKKPGYNGSCFNVEIKRNDDLSWLWNESTALYPSIYLNTQQSPVAATLYVRNRVREAIRVSKIPDAKSPLPVFAYTRIVFTDQVLKFLSQDELVYTFGETVALGASGIVIWGTWENTRTKESCQAIKEYMDTTLNPYIINVTLAAKMCSQVLCQEQGVCIRKNWNSSDYLHLNPDNFAIQLEKGGKFTVRGKPTLEDLEQFSEKFYCSCYSTLSCKEKADVKDTDAVDVCIADGVCIDAF

SEQ ID NO: 72 - protein, 455 aa, artificial Sequence
  Hyaluronidase Variant
LNFRAPPVIPNVPFLWAWNAPSEFCLGKFDEPLDMSLFSFIGSPRINATGQGVTIFYVDRLGYYPYIDSITGVTVNGGIPQKISLQDHLDKAKKDITFYMPVDNLGMAVIDWEEWRPTWARNWKPKDVYKNRSIELVQQQNVQLSLTEATEKAKQEFEKAGKDFLVETIKLGKLLRPNHLWGYYLFPDCYNHHYKKPGYNGSCFNVEIKRNDDLSWLWNESTALYPSIYLNTQQSPVAATLYVRNRVREAIRVSKIPDAKSPLPVFAYTRIVFTDQVLKFLSQDELVYTFGETVALGASGIVIWGSWENTRTKESCQAIKEYMDTTLNPYIINVTLAAKMCSQVLCQEQGVCIRKNWNSSDYLHLNPDNFAIQLEKGGKFTVRGKPTLEDLEQFSEKFYCSCYSTLSCKEKADVKDTDAVDVCIADGVCIDAFLKPPMETEEPQIFYNASPSTLS

SEQ ID NO: 73 - protein, 451 aa, artificial Sequence
  Hyaluronidase Variant
APPVIPNVPFLWAWNAPSEFCLGKFDEPLDMSLFSFIGSPRINATGQGVTIFYVDRLGYYPYIDSITGVTVNGGIPQKISLQDHLDKAKKDITFYMPVDNLGMAVIDWEEWRPTWARNWKPKDVYKNRSIELVQQQNVQLSLTEATEKAKQEFEKAGKDFLVETIKLGKLLRPNHLWGYYLFPDCYNHHYKKPGYNGSCFNVEIKRNDDLSWLWNESTALYPSIYLNTQQSPVAATLYVRNRVREAIRVSKIPDAKSPLPVFAYTRIVFTDQVLKFLSQDELVYTFGETVALGASGIVIWGTLSITRTKESCQAIKEYMDTTLNPYIINVTLAAKMCSQVLCQEQGVCIRKNWNSSDYLHLNPDNFAIQLEKGGKFTVRGKPTLEDLEQFSEKFYCSCYSTLSCKEKADVKDTDAVDVCIADGVCIDAFLKPPMETEEPQIFYNASPSTLS

SEQ ID NO: 74 - protein, 449 aa, artificial Sequence
  Hyaluronidase Variant
PVIPNVPFLWAWNAPSEFCLGKFDEPLDMSLFSFIGSPRINATGQGVTIFYVDRLGYYPYIDSITGVTVNGGIPQKISLQDHLDKAKKDITFYMPVDNLGMAVIDWEEWRPTWARNWKPKDVYKNRSIELVQQQNVQLSLTEATEKAKQEFEKAGKDFLVETIKLGKLLRPNHLWGYYLFPDCYNHHYKKPGYNGSCFNVEIKRNDDLSWLWNESTALYPSIYLNTQQSPVAATLYVRNRVREAIRVSKIPDAKSPLPVFAYTRIVFTDQVLKFLSQDELVYTFGETVALGASGIVIWGTLSITRTKESCQAIKEYMDTTLNPYIINVTLAAKMCSQVLCQEQGVCIRKNWNSSDYLHLNPDNFAIQLEKGGKFTVRGKPTLEDLEQFSEKFYCSCYSTLSCKEKADVKDTDAVDVCIADGVCIDAFLKPPMETEEPQIFYNASPSTLS

SEQ ID NO: 75 - protein, 432 aa, artificial Sequence
  Hyaluronidase Variant
LNFRAPPVIPNVPFLWAWNAPSEFCLGKFDEPLDMSLFSFIGSPRINATGQGVTIFYVDRLGYYPYIDSITGVTVNGGIPQKISLQDHLDKAKKDITFYMPVDNLGMAVIDWEEWRPTWARNWKPKDVYKNRSIELVQQQNVQLSLTEATEKAKQEFEKAGKDFLVETIKLGKLLRPNHLWGYYLFPDCYNHHYKKPGYNGSCFNVEIKRNDDLSWLWNESTALYPSIYLNTQQSPVAATLYVRNRVREAIRVSKIPDAKSPLPVFAYTRIVFTDQVLKFLSQDELVYTFGETVALGASGIVIWGTWENTRTKESCQAIKEYMDTTLNPYIINVTLAAKMCSQVLCQEQGVCIRKNWNSSDYLHLNPDNFAIQLEKGGKFTVRGKPTLEDLEQFSEKFYCSCYSTLSCKEKADVKDTDAVDVCIADGVCIDA

SEQ ID NO: 76 - protein, 429 aa, artificial Sequence
  Hyaluronidase Variant
LNFRAPPVIPNVPFLWAWNAPSEFCLGKFDEPLDMSLFSFIGSPRINATGQGVTIFYVDRLGYYPYIDSITGVTVNGGIPQKISLQDHLDKAKKDITFYMPVDNLGMAVIDWEEWRPTWARNWKPKDVYKNRSIELVQQQNVQLSLTEATEKAKQEFEKAGKDFLVETIKLGKLLRPNHLWGYYLFPDCYNHHYKKPGYNGSCFNVEIKRNDDLSWLWNESTALYPSIYLNTQQSPVAATLYVRNRVREAIRVSKIPDAKSPLPVFAYTRIVFTDQVLKFLSQDELVYTFGETVALGASGIVIWGTWENTRTKESCQAIKEYMDTTLNPYIINVTLAAKMCSQVLCQEQGVCIRKNWNSSDYLHLNPDNFAIQLEKGGKFTVRGKPTLEDLEQFSEKFYCSCYSTLSCKEKADVKDTDAVDVCIADGVC

SEQ ID NO: 77 - protein, 426 aa, artificial Sequence
  Hyaluronidase Variant
LNFRAPPVIPNVPFLWAWNAPSEFCLGKFDEPLDMSLFSFIGSPRINATGQGVTIFYVDRLGYYPYIDSITGVTVNGGIPQKISLQDHLDKAKKDITFYMPVDNLGMAVIDWEEWRPTWARNWKPKDVYKNRSIELVQQQNVQLSLTEATEKAKQEFEKAGKDFLVETIKLGKLLRPNHLWGYYLFPDCYNHHYKKPGYNGSCFNVEIKRNDDLSWLWNESTALYPSIYLNTQQSPVAATLYVRNRVREAIRVSKIPDAKSPLPVFAYTRIVFTDQVLKFLSQDELVYTFGETVALGASGIVIWGTWENTRTKESCQAIKEYMDTTLNPYIINVTLAAKMCSQVLCQEQGVCIRKNWNSSDYLHLNPDNFAIQLEKGGKFTVRGKPTLEDLEQFSEKFYCSCYSTLSCKEKADVKDTDAVDVCIAD

SEQ ID NO: 78 - protein, 423 aa, artificial Sequence
  Hyaluronidase Variant
LNFRAPPVIPNVPFLWAWNAPSEFCLGKFDEPLDMSLFSFIGSPRINATGQGVTIFYVDRLGYYPYIDSITGVTVNGGIPQKISLQDHLDKAKKDITFYMPVDNLGMAVIDWEEWRPTWARNWKPKDVYKNRSIELVQQQNVQLSLTEATEKAKQEFEKAGKDFLVETIKLGKLLRPNHLWGYYLFPDCYNHHYKKPGYNGSCFNVEIKRNDDLSWLWNESTALYPSIYLNTQQSPVAATLYVRNRVREAIRVSKIPDAKSPLPVFAYTRIVFTDQVLKFLSQDELVYTFGETVALGASGIVIWGTWENTRTKESCQAIKEYMDTTLNPYIINVTLAAKMCSQVLCQEQGVCIRKNWNSSDYLHLNPDNFAIQLEKGGKFTVRGKPTLEDLEQFSEKFYCSCYSTLSCKEKADVKDTDAVDVC

SEQ ID NO: 79 - protein, 420 aa, artificial Sequence
  Hyaluronidase Variant
LNFRAPPVIPNVPFLWAWNAPSEFCLGKFDEPLDMSLFSFIGSPRINATGQGVTIFYVDRLGYYPYIDSITGVTVNGGIPQKISLQDHLDKAKKDITFYMPVDNLGMAVIDWEEWRPTWARNWKPKDVYKNRSIELVQQQNVQLSLTEATEKAKQEFEKAGKDFLVETIKLGKLLRPNHLWGYYLFPDCYNHHYKKPGYNGSCFNVEIKRNDDLSWLWNESTALYPSIYLNTQQSPVAATLYVRNRVREAIRVSKIPDAKSPLPVFAYTRIVFTDQVLKFLSQDELVYTFGETVALGASGIVIWGTWENTRTKESCQAIKEYMDTTLNPYIINVTLAAKMCSQVLCQEQGVCIRKNWNSSDYLHLNPDNFAIQLEKGGKFTVRGKPTLEDLEQFSEKFYCSCYSTLSCKEKADVKDTDAV

SEQ ID NO: 80 - protein, 433 aa, artificial Sequence
  Hyaluronidase Variant
FRAPPVIPNVPFLWAWNAPSEFCLGKFDEPLDMSLFSFIGSPRINATGQGVTIFYVDRLGYYPYIDSITGVTVNGGIPQKISLQDHLDKAKKDITFYMPVDNLGMAVIDWEEWRPTWARNWKPKDVYKNRSIELVQQQNVQLSLTEATEKAKQEFEKAGKDFLVETIKLGKLLRPNHLWGYYLFPDCYNHHYKKPGYNGSCFNVEIKRNDDLSWLWNESTALYPSIYLNTQQSPVAATLYVRNRVREAIRVSKIPDAKSPLPVFAYTRIVFTDQVLKFLSQDELVYTFGETVALGASGIVIWGSWENTRTKESCQAIKEYMDTTLNPYIINVTLAAKMCSQVLCQEQGVCIRKNWNSSDYLHLNPDNFAIQLEKGGKFTVRGKPTLEDLEQFSEKFYCSCYSTLSCKEKADVKDTDAVDVCIADGVCIDAFLK

SEQ ID NO: 81 - protein, 435 aa, artificial Sequence
  Hyaluronidase Variant
FRAPPVIPNVPFLWAWNAPSEFCLGKFDEPLDMSLFSFIGSPRINATGQGVTIFYVDRLGYYPYIDSITGVTVNGGIPQKISLQDHLDKAKKDITFYMPVDNLGMAVIDWEEWRPTWARNWKPKDVYKNRSIELVQQQNVQLSLTEATEKAKQEFEKAGKDFLVETIKLGKLLRPNHLWGYYLFPDCYNHHYKKPGYNGSCFNVEIKRNDDLSWLWNESTALYPSIYLNTQQSPVAATLYVRNRVREAIRVSKIPDAKSPLPVFAYTRIVFTDQVLKFLSQDELVYTFGETVALGASGIVIWGTWENTRTKESCQAIKEYMDTTLNPYIINVTLAAKMCSQVLCQEQGVCIRKNWNSSDYLHLNPDNFAIQLEKGGKFTVRGKPTLEDLEQFSEKFYCSCYSTLSCKEKADVKDTDAVDVCIADGVCIDAFLKPP

SEQ ID NO: 82 - protein, 436 aa, artificial Sequence
  Hyaluronidase Variant
FRAPPVIPNVPFLWAWNAPSEFCLGKFDEPLDMSLFSFIGSPRINATGQGVTIFYVDRLGYYPYIDSITGVTVNGGIPQKISLQDHLDKAKKDITFYMPVDNLGMAVIDWEEWRPTWARNWKPKDVYKNRSIELVQQQNVQLSLTEATEKAKQEFEKAGKDFLVETIKLGKLLRPNHLWGYYLFPDCYNHHYKKPGYNGSCFNVEIKRNDDLSWLWNESTALYPSIYLNTQQSPVAATLYVRNRVREAIRVSKIPDAKSPLPVFAYTRIVFTDQVLKFLSQDELVYTFGETVALGASGIVIWGTWENTRTKESCQAIKEYMDTTLNPYIINVTLAAKMCSQVLCQEQGVCIRKNWNSSDYLHLNPDNFAIQLEKGGKFTVRGKPTLEDLEQFSEKFYCSCYSTLSCKEKADVKDTDAVDVCIADGVCIDAFLKPPM

SEQ ID NO: 83 - protein, 437 aa, artificial Sequence
  Hyaluronidase Variant
FRAPPVIPNVPFLWAWNAPSEFCLGKFDEPLDMSLFSFIGSPRINATGQGVTIFYVDRLGYYPYIDSITGVTVNGGIPQKISLQDHLDKAKKDITFYMPVDNLGMAVIDWEEWRPTWARNWKPKDVYKNRSIELVQQQNVQLSLTEATEKAKQEFEKAGKDFLVETIKLGKLLRPNHLWGYYLFPDCYNHHYKKPGYNGSCFNVEIKRNDDLSWLWNESTALYPSIYLNTQQSPVAATLYVRNRVREAIRVSKIPDAKSPLPVFAYTRIVFTDQVLKFLSQDELVYTFGETVALGASGIVIWGTWENTRTKESCQAIKEYMDTTLNPYIINVTLAAKMCSQVLCQEQGVCIRKNWNSSDYLHLNPDNFAIQLEKGGKFTVRGKPTLEDLEQFSEKFYCSCYSTLSCKEKADVKDTDAVDVCIADGVCIDAFLKPPME

SEQ ID NO: 84 - protein, 438 aa, artificial Sequence
  Hyaluronidase Variant
FRAPPVIPNVPFLWAWNAPSEFCLGKFDEPLDMSLFSFIGSPRINATGQGVTIFYVDRLGYYPYIDSITGVTVNGGIPQKISLQDHLDKAKKDITFYMPVDNLGMAVIDWEEWRPTWARNWKPKDVYKNRSIELVQQQNVQLSLTEATEKAKQEFEKAGKDFLVETIKLGKLLRPNHLWGYYLFPDCYNHHYKKPGYNGSCFNVEIKRNDDLSWLWNESTALYPSIYLNTQQSPVAATLYVRNRVREAIRVSKIPDAKSPLPVFAYTRIVFTDQVLKFLSQDELVYTFGETVALGASGIVIWGTWENTRTKESCQAIKEYMDTTLNPYIINVTLAAKMCSQVLCQEQGVCIRKNWNSSDYLHLNPDNFAIQLEKGGKFTVRGKPTLEDLEQFSEKFYCSCYSTLSCKEKADVKDTDAVDVCIADGVCIDAFLKPPMET

SEQ ID NO: 85 - protein, 439 aa, artificial Sequence
  Hyaluronidase Variant
FRAPPVIPNVPFLWAWNAPSEFCLGKFDEPLDMSLFSFIGSPRINATGQGVTIFYVDRLGYYPYIDSITGVTVNGGIPQKISLQDHLDKAKKDITFYMPVDNLGMAVIDWEEWRPTWARNWKPKDVYKNRSIELVQQQNVQLSLTEATEKAKQEFEKAGKDFLVETIKLGKLLRPNHLWGYYLFPDCYNHHYKKPGYNGSCFNVEIKRNDDLSWLWNESTALYPSIYLNTQQSPVAATLYVRNRVREAIRVSKIPDAKSPLPVFAYTRIVFTDQVLKFLSQDELVYTFGETVALGASGIVIWGTWENTRTKESCQAIKEYMDTTLNPYIINVTLAAKMCSQVLCQEQGVCIRKNWNSSDYLHLNPDNFAIQLEKGGKFTVRGKPTLEDLEQFSEKFYCSCYSTLSCKEKADVKDTDAVDVCIADGVCIDAFLKPPMETE

SEQ ID NO: 86 - protein, 454 aa, artificial Sequence
  Hyaluronidase Variant
NFRAPPVIPNVPFLWAWNAPSEFCLGKFDEPLDMSLFSFIGSPRINATGQGVTIFYVDRLGYYPYIDSITGVTVNGGIPQKISLQDHLDKAKKDITFYMPVDNLGMAVIDWEEWRPTWARNWKPKDVYKNRSIELVQQQNVQLSLTEATEKAKQEFEKAGKDFLVETIKLGKLLRPNHLWGYYLFPDCYNHHYKKPGYNGSCFNVEIKRNDDLSWLWNESTALYPSIYLNTQQSPVAATLYVRNRVREAIRVSKIPDAKSPLPVFAYTRIVFTDQVLKFLSQDELVYTFGETVALGASGIVIWGTLSITRTKESCQAIKEYMDTTLNPYIINVTLAAKMCSQVLCQEQGVCIRKNWNSSDYLHLNPDNFAIQLEKGGKFTVRGKPTLEDLEQFSEKFYCSCYSTLSCKEKADVKDTDAVDVCIADGVCIDAFLKPPMETEEPQIFYNASPSTLS

SEQ ID NO: 87 - protein, 452 aa, artificial Sequence
  Hyaluronidase Variant
RAPPVIPNVPFLWAWNAPSEFCLGKFDEPLDMSLFSFIGSPRINATGQGVTIFYVDRLGYYPYIDSITGVTVNGGIPQKISLQDHLDKAKKDITFYMPVDNLGMAVIDWEEWRPTWARNWKPKDVYKNRSIELVQQQNVQLSLTEATEKAKQEFEKAGKDFLVETIKLGKLLRPNHLWGYYLFPDCYNHHYKKPGYNGSCFNVEIKRNDDLSWLWNESTALYPSIYLNTQQSPVAATLYVRNRVREAIRVSKIPDAKSPLPVFAYTRIVFTDQVLKFLSQDELVYTFGETVALGASGIVIWGTLSITRTKESCQAIKEYMDTTLNPYIINVTLAAKMCSQVLCQEQGVCIRKNWNSSDYLHLNPDNFAIQLEKGGKFTVRGKPTLEDLEQFSEKFYCSCYSTLSCKEKADVKDTDAVDVCIADGVCIDAFLKPPMETEEPQIFYNASPSTLS

SEQ ID NO: 88 - protein, 450 aa, artificial Sequence
  Hyaluronidase Variant
PPVIPNVPFLWAWNAPSEFCLGKFDEPLDMSLFSFIGSPRINATGQGVTIFYVDRLGYYPYIDSITGVTVNGGIPQKISLQDHLDKAKKDITFYMPVDNLGMAVIDWEEWRPTWARNWKPKDVYKNRSIELVQQQNVQLSLTEATEKAKQEFEKAGKDFLVETIKLGKLLRPNHLWGYYLFPDCYNHHYKKPGYNGSCFNVEIKRNDDLSWLWNESTALYPSIYLNTQQSPVAATLYVRNRVREAIRVSKIPDAKSPLPVFAYTRIVFTDQVLKFLSQDELVYTFGETVALGASGIVIWGTLSITRTKESCQAIKEYMDTTLNPYIINVTLAAKMCSQVLCQEQGVCIRKNWNSSDYLHLNPDNFAIQLEKGGKFTVRGKPTLEDLEQFSEKFYCSCYSTLSCKEKADVKDTDAVDVCIADGVCIDAFLKPPMETEEPQIFYNASPSTLS

SEQ ID NO: 89 - protein, 428 aa, artificial Sequence
  Hyaluronidase Variant
FRAPPVIPNVPFLWAWNAPSEFCLGKFDEPLDMSLFSFIGSPRINATGQGVTIFYVDRLGYYPYIDSITGVTVNGGIPQKISLQDHLDKAKKDITFYMPVDNLGMAVIDWEEWRPTWARNWKPKDVYKNRSIELVQQQNVQLSLTEATEKAKQEFEKAGKDFLVETIKLGKLLRPNHLWGYYLFPDCYNHHYKKPGYNGSCFNVEIKRNDDLSWLWNESTALYPSIYLNTQQSPVAATLYVRNRVREAIRVSKIPDAKSPLPVFAYTRIVFTDQVLKFLSQDELVYTFGETVALGASGIVIWGSWENTRTKESCQAIKEYMDTTLNPYIINVTLAAKMCSQVLCQEQGVCIRKNWNSSDYLHLNPDNFAIQLEKGGKFTVRGKPTLEDLEQFSEKFYCSCYSTLSCKEKADVKDTDAVDVCIADGVCI

SEQ ID NO: 90 - protein, 429 aa, artificial Sequence
  Hyaluronidase Variant
FRAPPVIPNVPFLWAWNAPSEFCLGKFDEPLDMSLFSFIGSPRINATGQGVTIFYVDRLGYYPYIDSITGVTVNGGIPQKISLQDHLDKAKKDITFYMPVDNLGMAVIDWEEWRPTWARNWKPKDVYKNRSIELVQQQNVQLSLTEATEKAKQEFEKAGKDFLVETIKLGKLLRPNHLWGYYLFPDCYNHHYKKPGYNGSCFNVEIKRNDDLSWLWNESTALYPSIYLNTQQSPVAATLYVRNRVREAIRVSKIPDAKSPLPVFAYTRIVFTDQVLKFLSQDELVYTFGETVALGASGIVIWGSWENTRTKESCQAIKEYMDTTLNPYIINVTLAAKMCSQVLCQEQGVCIRKNWNSSDYLHLNPDNFAIQLEKGGKFTVRGKPTLEDLEQFSEKFYCSCYSTLSCKEKADVKDTDAVDVCIADGVCID

SEQ ID NO: 91 - protein, 430 aa, artificial Sequence
  Hyaluronidase Variant
FRAPPVIPNVPFLWAWNAPSEFCLGKFDEPLDMSLFSFIGSPRINATGQGVTIFYVDRLGYYPYIDSITGVTVNGGIPQKISLQDHLDKAKKDITFYMPVDNLGMAVIDWEEWRPTWARNWKPKDVYKNRSIELVQQQNVQLSLTEATEKAKQEFEKAGKDFLVETIKLGKLLRPNHLWGYYLFPDCYNHHYKKPGYNGSCFNVEIKRNDDLSWLWNESTALYPSIYLNTQQSPVAATLYVRNRVREAIRVSKIPDAKSPLPVFAYTRIVFTDQVLKFLSQDELVYTFGETVALGASGIVIWGSWENTRTKESCQAIKEYMDTTLNPYIINVTLAAKMCSQVLCQEQGVCIRKNWNSSDYLHLNPDNFAIQLEKGGKFTVRGKPTLEDLEQFSEKFYCSCYSTLSCKEKADVKDTDAVDVCIADGVCIDA

SEQ ID NO: 92 - protein, 431 aa, artificial Sequence
  Hyaluronidase Variant
FRAPPVIPNVPFLWAWNAPSEFCLGKFDEPLDMSLFSFIGSPRINATGQGVTIFYVDRLGYYPYIDSITGVTVNGGIPQKISLQDHLDKAKKDITFYMPVDNLGMAVIDWEEWRPTWARNWKPKDVYKNRSIELVQQQNVQLSLTEATEKAKQEFEKAGKDFLVETIKLGKLLRPNHLWGYYLFPDCYNHHYKKPGYNGSCFNVEIKRNDDLSWLWNESTALYPSIYLNTQQSPVAATLYVRNRVREAIRVSKIPDAKSPLPVFAYTRIVFTDQVLKFLSQDELVYTFGETVALGASGIVIWGSWENTRTKESCQAIKEYMDTTLNPYIINVTLAAKMCSQVLCQEQGVCIRKNWNSSDYLHLNPDNFAIQLEKGGKFTVRGKPTLEDLEQFSEKFYCSCYSTLSCKEKADVKDTDAVDVCIADGVCIDAF

SEQ ID NO: 93 - protein, 441 aa, artificial Sequence
  Hyaluronidase Variant
FRAPPVIPNVPFLWAWNAPSEFCLGKFDEPLDMSLFSFIGSPRINATGQGVTIFYVDRLGYYPYIDSITGVTVNGGIPQKISLQDHLDKAKKDITFYMPVDNLGMAVIDWEEWRPTWARNWKPKDVYKNRSIELVQQQNVQLSLTEATEKAKQEFEKAGKDFLVETIKLGKLLRPNHLWGYYLFPDCYNHHYKKPGYNGSCFNVEIKRNDDLSWLWNESTALYPSIYLNTQQSPVAATLYVRNRVREAIRVSKIPDAKSPLPVFAYTRIVFTDQVLKFLSQDELVYTFGETVALGASGIVIWGTWENTRTKESCQAIKEYMDTTLNPYIINVTLAAKMCSQVLCQEQGVCIRKNWNSSDYLHLNPDNFAIQLEKGGKFTVRGKPTLEDLEQFSEKFYCSCYSTLSCKEKADVKDTDAVDVCIADGVCIDAFLKPPMETEEP

SEQ ID NO: 94 - protein, 443 aa, artificial Sequence
  Hyaluronidase Variant
FRAPPVIPNVPFLWAWNAPSEFCLGKFDEPLDMSLFSFIGSPRINATGQGVTIFYVDRLGYYPYIDSITGVTVNGGIPQKISLQDHLDKAKKDITFYMPVDNLGMAVIDWEEWRPTWARNWKPKDVYKNRSIELVQQQNVQLSLTEATEKAKQEFEKAGKDFLVETIKLGKLLRPNHLWGYYLFPDCYNHHYKKPGYNGSCFNVEIKRNDDLSWLWNESTALYPSIYLNTQQSPVAATLYVRNRVREAIRVSKIPDAKSPLPVFAYTRIVFTDQVLKFLSQDELVYTFGETVALGASGIVIWGTWENTRTKESCQAIKEYMDTTLNPYIINVTLAAKMCSQVLCQEQGVCIRKNWNSSDYLHLNPDNFAIQLEKGGKFTVRGKPTLEDLEQFSEKFYCSCYSTLSCKEKADVKDTDAVDVCIADGVCIDAFLKPPMETEEPQI

SEQ ID NO: 95 - protein, 445 aa, artificial Sequence
  Hyaluronidase Variant
FRAPPVIPNVPFLWAWNAPSEFCLGKFDEPLDMSLFSFIGSPRINATGQGVTIFYVDRLGYYPYIDSITGVTVNGGIPQKISLQDHLDKAKKDITFYMPVDNLGMAVIDWEEWRPTWARNWKPKDVYKNRSIELVQQQNVQLSLTEATEKAKQEFEKAGKDFLVETIKLGKLLRPNHLWGYYLFPDCYNHHYKKPGYNGSCFNVEIKRNDDLSWLWNESTALYPSIYLNTQQSPVAATLYVRNRVREAIRVSKIPDAKSPLPVFAYTRIVFTDQVLKFLSQDELVYTFGETVALGASGIVIWGTWENTRTKESCQAIKEYMDTTLNPYIINVTLAAKMCSQVLCQEQGVCIRKNWNSSDYLHLNPDNFAIQLEKGGKFTVRGKPTLEDLEQFSEKFYCSCYSTLSCKEKADVKDTDAVDVCIADGVCIDAFLKPPMETEEPQIFY

SEQ ID NO: 96 - protein, 447 aa, artificial Sequence
  Hyaluronidase Variant
FRAPPVIPNVPFLWAWNAPSEFCLGKFDEPLDMSLFSFIGSPRINATGQGVTIFYVDRLGYYPYIDSITGVTVNGGIPQKISLQDHLDKAKKDITFYMPVDNLGMAVIDWEEWRPTWARNWKPKDVYKNRSIELVQQQNVQLSLTEATEKAKQEFEKAGKDFLVETIKLGKLLRPNHLWGYYLFPDCYNHHYKKPGYNGSCFNVEIKRNDDLSWLWNESTALYPSIYLNTQQSPVAATLYVRNRVREAIRVSKIPDAKSPLPVFAYTRIVFTDQVLKFLSQDELVYTFGETVALGASGIVIWGTWENTRTKESCQAIKEYMDTTLNPYIINVTLAAKMCSQVLCQEQGVCIRKNWNSSDYLHLNPDNFAIQLEKGGKFTVRGKPTLEDLEQFSEKFYCSCYSTLSCKEKADVKDTDAVDVCIADGVCIDAFLKPPMETEEPQIFYNA

SEQ ID NO: 97 - protein, 449 aa, artificial Sequence
  Hyaluronidase Variant
FRAPPVIPNVPFLWAWNAPSEFCLGKFDEPLDMSLFSFIGSPRINATGQGVTIFYVDRLGYYPYIDSITGVTVNGGIPQKISLQDHLDKAKKDITFYMPVDNLGMAVIDWEEWRPTWARNWKPKDVYKNRSIELVQQQNVQLSLTEATEKAKQEFEKAGKDFLVETIKLGKLLRPNHLWGYYLFPDCYNHHYKKPGYNGSCFNVEIKRNDDLSWLWNESTALYPSIYLNTQQSPVAATLYVRNRVREAIRVSKIPDAKSPLPVFAYTRIVFTDQVLKFLSQDELVYTFGETVALGASGIVIWGTWENTRTKESCQAIKEYMDTTLNPYIINVTLAAKMCSQVLCQEQGVCIRKNWNSSDYLHLNPDNFAIQLEKGGKFTVRGKPTLEDLEQFSEKFYCSCYSTLSCKEKADVKDTDAVDVCIADGVCIDAFLKPPMETEEPQIFYNASP

SEQ ID NO: 98 - protein, 451 aa, artificial Sequence
  Hyaluronidase Variant
FRAPPVIPNVPFLWAWNAPSEFCLGKFDEPLDMSLFSFIGSPRINATGQGVTIFYVDRLGYYPYIDSITGVTVNGGIPQKISLQDHLDKAKKDITFYMPVDNLGMAVIDWEEWRPTWARNWKPKDVYKNRSIELVQQQNVQLSLTEATEKAKQEFEKAGKDFLVETIKLGKLLRPNHLWGYYLFPDCYNHHYKKPGYNGSCFNVEIKRNDDLSWLWNESTALYPSIYLNTQQSPVAATLYVRNRVREAIRVSKIPDAKSPLPVFAYTRIVFTDQVLKFLSQDELVYTFGETVALGASGIVIWGTWENTRTKESCQAIKEYMDTTLNPYIINVTLAAKMCSQVLCQEQGVCIRKNWNSSDYLHLNPDNFAIQLEKGGKFTVRGKPTLEDLEQFSEKFYCSCYSTLSCKEKADVKDTDAVDVCIADGVCIDAFLKPPMETEEPQIFYNASPST

SEQ ID NO: 99 - protein, 455 aa, artificial Sequence
  Hyaluronidase Variant
LNFRAPPVIPNVPFLWAWNAPSEFCLGKFDEPLDMSLFSFIGSPRINATGQGVTIFYVDRLGYYPYIDSITGVTVNGGIPQKISLQDHLDKAKKDITFYMPVDNLGMAVIDWEEWRPTWARNWKPKDVYKNRSIELVQQQNVQLSLTEATEKAKQEFEKAGKDFLVETIKLGKLLRPNHLWGYYLFPDCYNHHYKKPGYNGSCFNVEIKRNDDLSWLWNESTALYPSIYLNTQQSPVAATLYVRNRVREAIRVSKIPDAKSPLPVFAYTRIVFTDQVLKFLSQDELVYTFGETVALGASGIVIWGGWENTRTKESCQAIKEYMDTTLNPYIINVTLAAKMCSQVLCQEQGVCIRKNWNSSDYLHLNPDNFAIQLEKGGKFTVRGKPTLEDLEQFSEKFYCSCYSTLSCKEKADVKDTDAVDVCIADGVCIDAFLKPPMETEEPQIFYNASPSTLS

SEQ ID NO: 100 - protein, 455 aa, artificial Sequence
  Hyaluronidase Variant
LNFRAPPVIPNVPFLWAWNAPSEFCLGKFDEPLDMSLFSFIGSPRINATGQGVTIFYVDRLGYYPYIDSITGVTVNGGIPQKISLQDHLDKAKKDITFYMPVDNLGMAVIDWEEWRPTWARNWKPKDVYKNRSIELVQQQNVQLSLTEATEKAKQEFEKAGKDFLVETIKLGKLLRPNHLWGYYLFPDCYNHHYKKPGYNGSCFNVEIKRNDDLSWLWNESTALYPSIYLNTQQSPVAATLYVRNRVREAIRVSKIPDAKSPLPVFAYTRIVFTDQVLKFLSQDELVYTFGETVALGASGIVIWGAWENTRTKESCQAIKEYMDTTLNPYIINVTLAAKMCSQVLCQEQGVCIRKNWNSSDYLHLNPDNFAIQLEKGGKFTVRGKPTLEDLEQFSEKFYCSCYSTLSCKEKADVKDTDAVDVCIADGVCIDAFLKPPMETEEPQIFYNASPSTLS

SEQ ID NO: 101 - protein, 455 aa, artificial Sequence
  Hyaluronidase Variant
LNFRAPPVIPNVPFLWAWNAPSEFCLGKFDEPLDMSLFSFIGSPRINATGQGVTIFYVDRLGYYPYIDSITGVTVNGGIPQKISLQDHLDKAKKDITFYMPVDNLGMAVIDWEEWRPTWARNWKPKDVYKNRSIELVQQQNVQLSLTEATEKAKQEFEKAGKDFLVETIKLGKLLRPNHLWGYYLFPDCYNHHYKKPGYNGSCFNVEIKRNDDLSWLWNESTALYPSIYLNTQQSPVAATLYVRNRVREAIRVSKIPDAKSPLPVFAYTRIVFTDQVLKFLSQDELVYTFGETVALGASGIVIWGCWENTRTKESCQAIKEYMDTTLNPYIINVTLAAKMCSQVLCQEQGVCIRKNWNSSDYLHLNPDNFAIQLEKGGKFTVRGKPTLEDLEQFSEKFYCSCYSTLSCKEKADVKDTDAVDVCIADGVCIDAFLKPPMETEEPQIFYNASPSTLS

SEQ ID NO: 102 - protein, 455 aa, artificial Sequence
  Hyaluronidase Variant
LNFRAPPVIPNVPFLWAWNAPSEFCLGKFDEPLDMSLFSFIGSPRINATGQGVTIFYVDRLGYYPYIDSITGVTVNGGIPQKISLQDHLDKAKKDITFYMPVDNLGMAVIDWEEWRPTWARNWKPKDVYKNRSIELVQQQNVQLSLTEATEKAKQEFEKAGKDFLVETIKLGKLLRPNHLWGYYLFPDCYNHHYKKPGYNGSCFNVEIKRNDDLSWLWNESTALYPSIYLNTQQSPVAATLYVRNRVREAIRVSKIPDAKSPLPVFAYTRIVFTDQVLKFLSQDELVYTFGETVALGASGIVIWGDWENTRTKESCQAIKEYMDTTLNPYIINVTLAAKMCSQVLCQEQGVCIRKNWNSSDYLHLNPDNFAIQLEKGGKFTVRGKPTLEDLEQFSEKFYCSCYSTLSCKEKADVKDTDAVDVCIADGVCIDAFLKPPMETEEPQIFYNASPSTLS

SEQ ID NO: 103 - protein, 431 aa, artificial Sequence
  Hyaluronidase Variant
FRAPPVIPNVPFLWAWNAPSEFCLGKFDEPLDMSLFSFIGSPRINATGQGVTIFYVDRLGYYPYIDSITGVTVNGGIPQKISLQDHLDKAKKDITFYMPVDNLGMAVIDWEEWRPTWARNWKPKDVYKNRSIELVQQQNVQLSLTEATEKAKQEFEKAGKDFLVETIKLGKLLRPNHLWGYYLFPDCYNHHYKKPGYNGSCFNVEIKRNDDLSWLWNESTALYPSIYLNTQQSPVAATLYVRNRVREAIRVSKIPDAKSPLPVFAYTRIVFTDQVLKFLSQDELVYTFGETVALGASGIVIWGTLSNTRTKESCQAIKEYMDTTLNPYIINVTLAAKMCSQVLCQEQGVCIRKNWNSSDYLHLNPDNFAIQLEKGGKFTVRGKPTLEDLEQFSEKFYCSCYSTLSCKEKADVKDTDAVDVCIADGVCIDAF

SEQ ID NO: 104 - protein, 431 aa, artificial Sequence
  Hyaluronidase Variant
FRAPPVIPNVPFLWAWNAPSEFCLGKFDEPLDMSLFSFIGSPRINATGQGVTIFYVDRLGYYPYIDSITGVTVNGGIPQKISLQDHLDKAKKDITFYMPVDNLGMAVIDWEEWRPTWARNWKPKDVYKNRSIELVQQQNVQLSLTEATEKAKQEFEKAGKDFLVETIKLGKLLRPNHLWGYYLFPDCYNHHYKKPGYNGSCFNVEIKRNDDLSWLWNESTALYPSIYLNTQQSPVAATLYVRNRVREAIRVSKIPDAKSPLPVFAYTRIVFTDQVLKFLSQDELVYTFGETVALGASGIVIWGTLENTRTKESCQAIKEYMDTTLNPYIINVTLAAKMCSQVLCQEQGVCIRKNWNSSDYLHLNPDNFAIQLEKGGKFTVRGKPTLEDLEQFSEKFYCSCYSTLSCKEKADVKDTDAVDVCIADGVCIDAF

SEQ ID NO: 105 - protein, 431 aa, artificial Sequence
  Hyaluronidase Variant
FRAPPVIPNVPFLWAWNAPSEFCLGKFDEPLDMSLFSFIGSPRINATGQGVTIFYVDRLGYYPYIDSITGVTVNGGIPQKISLQDHLDKAKKDITFYMPVDNLGMAVIDWEEWRPTWARNWKPKDVYKNRSIELVQQQNVQLSLTEATEKAKQEFEKAGKDFLVETIKLGKLLRPNHLWGYYLFPDCYNHHYKKPGYNGSCFNVEIKRNDDLSWLWNESTALYPSIYLNTQQSPVAATLYVRNRVREAIRVSKIPDAKSPLPVFAYTRIVFTDQVLKFLSQDELVYTFGETVALGASGIVIWGAWENTRTKESCQAIKEYMDTTLNPYIINVTLAAKMCSQVLCQEQGVCIRKNWNSSDYLHLNPDNFAIQLEKGGKFTVRGKPTLEDLEQFSEKFYCSCYSTLSCKEKADVKDTDAVDVCIADGVCIDAF

SEQ ID NO: 106 - protein, 431 aa, artificial Sequence
  Hyaluronidase Variant
FRAPPVIPNVPFLWAWNAPSEFCLGKFDEPLDMSLFSFIGSPRINATGQGVTIFYVDRLGYYPYIDSITGVTVNGGIPQKISLQDHLDKAKKDITFYMPVDNLGMAVIDWEEWRPTWARNWKPKDVYKNRSIELVQQQNVQLSLTEATEKAKQEFEKAGKDFLVETIKLGKLLRPNHLWGYYLFPDCYNHHYKKPGYNGSCFNVEIKRNDDLSWLWNESTALYPSIYLNTQQSPVAATLYVRNRVREAIRVSKIPDAKSPLPVFAYTRIVFTDQVLKFLSQDELVYTFGETVALGASGIVIWGGWENTRTKESCQAIKEYMDTTLNPYIINVTLAAKMCSQVLCQEQGVCIRKNWNSSDYLHLNPDNFAIQLEKGGKFTVRGKPTLEDLEQFSEKFYCSCYSTLSCKEKADVKDTDAVDVCIADGVCIDAF

SEQ ID NO: 107 - protein, 431 aa, artificial Sequence
  Hyaluronidase Variant
FRGPPVIPNVPFLWAWNAPSEFCLGKFDEPLDMSLFSFIGSPRINATGQGVTIFYVDRLGYYPYIDSITGVTVNGGIPQKISLQDHLDKAKKDITFYMPVDNLGMAVIDWEEWRPTWARNWKPKDVYKNRSIELVQQQNVQLSLTEATEKAKQEFEKAGKDFLVETIKLGKLLRPNHLWGYYLFPDCYNHHYKKPGYNGSCFNVEIKRNDDLSWLWNESTALYPSIYLNTQQSPVAATLYVRNRVREAIRVSKIPDAKSPLPVFAYTRIVFTDQVLKFLSQDELVYTFGETVALGASGIVIWGSWENTRTKESCQAIKEYMDTTLNPYIINVTLAAKMCSQVLCQEQGVCIRKNWNSSDYLHLNPDNFAIQLEKGGKFTVRGKPTLEDLEQFSEKFYCSCYSTLSCKEKADVKDTDAVDVCIADGVCIDAF

SEQ ID NO: 108 - protein, 400 aa, artificial Sequence
  Hyaluronidase Variant
FRGPPVIPNVPFLWAWNAPSEFCLGKFDEPLDMSLFSFIGSPRINATGQGVTIFYVDRLGYYPYIDSITGVTVNGGIPQKISLQDHLDKAKKDITFYMPVDNLGMAVIDWEEWRPTWARNWKPKDVYKNRSIELVQQQNVQLSLTEATEKAKQEFEKAGKDFLVETIKLGKLLRPNHLWGYYLFPDCYNHHYKKPGYNGSCFNVEIKRNDDLSWLWNESTALYPSIYLNTQQSPVAATLYVRNRVREAIRVSKIPDAKSPLPVFAYTRIVFTDQVLKFLSQDELVYTFGETVALGASGIVIWGSWENTRTKESCQAIKEYMDTTLNPYIINVTLAAKMCSQVLCQEQGVCIRKNWNSSDYLHLNPDNFAIQLEKGGKFTVRGKPTLEDLEQFSEKFYCSC

SEQ ID NO: 109 - protein, 482 aa, artificial Sequence
  Hyaluronidase Variant
FRAPPVIPNVPFLWAWNAPSEFCLGKFDEPLDMSLFSFIGSPRINATGQGVTIFYVDRLGYYPYIDSITGVTVNGGIPQKISLQDHLDKAKKDITFYMPVDNLGMAVIDWEEWRPTWARNWKPKDVYKNRSIELVQQQNVQLSLTEATEKAKQEFEKAGKDFLVETIKLGKLLRPNHLWGYYLFPDCYNHHYKKPGYNGSCFNVEIKRNDDLSWLWNESTALYPSIYLNTQQSPVAATLYVRNRVREAIRVSKIPDAKSPLPVFAYTRIVFTDQVLKFLSQDELVYTFGETVALGASGIVIWGTWENTRTKESCQAIKEYMDTTLNPYIINVTLAAKMCSQVLCQEQGVCIRKNWNSSDYLHLNPDNFAIQLEKGGKFTVRGKPTLEDLEQFSEKFYCSCYSTLSCKEKADVKDTDAVDVCIADGVCIDAFLKPPMETEEPQIFYNASPSTYSTLSCKEKADVKDTDAVDVCIADGVCIDAF

SEQ ID NO: 110 - protein, 455 aa, artificial Sequence
  Hyaluronidase Variant
LNFRAPPVIPNVPFLWAWNAPSEFCLGKFDEPLDMSLFSFIGSPRINATGQGVTIFYVDRLGYYPYIDSITGVTVNGGIPQKISLQDHLDKAKKDITFYMPVDNLGMAVIDWEEWRPTWARNWKPKDVYKNRSIELVQQQNVQLSLTEATEKAKQEFEKAGKDFLVETIKLGKLLRPNHLWGYYLFPDCYNHHYKKPGYNGSCFNVEIKRNDDLSWLWNESTALYPSIYLNTQQSPVAATLYVRNRVREAIRVSKIPDAKSPLPVFAYTRIVFTDQVLKFLSQDELVYTFGETVALGASGIVIWGTLSITTSTETCQYLKDYLTRLLNPYIINVTLAAKMCSQVLCQEQGVCIRKNWNSSDYLHLNPDNFAIQLEKGGKFTVRGKPTLEDLEQFSEKFYCSCYSTLSCKEKADVKDTDAVDVCIADGVCIDAFLKPPMETEEPQIFYNASPSTLS

SEQ ID NO: 111 - protein, 455 aa, artificial Sequence
  Hyaluronidase Variant
LNFRAPPVIPNVPFLWAWNAPSEFCLGKFDEPLDMSLFSFIGSPRINATGQGVTIFYVDRLGYYPYIDSITGVTVNGGIPQKISLQDHLDKAKKDITFYMPVDNLGMAVIDWEEWRPTWARNWKPKDVYKNRSIELVQQQNVQLSLTEATEKAKQEFEKAGKDFLVETIKLGKLLRPNHLWGYYLFPDCYNHHYKKPGYNGSCFNVEIKRNDDLSWLWNESTALYPSIYLNTQQSPVAATLYVRNRVREAIRVSKIPDAKSPLPVFAYTRIVFTDQVLKFLSQDELVYTFGETVALGASGIVIWGTLSISSSEEECWHLHDYLVDTLNPYIINVTLAAKMCSQVLCQEQGVCIRKNWNSSDYLHLNPDNFAIQLEKGGKFTVRGKPTLEDLEQFSEKFYCSCYSTLSCKEKADVKDTDAVDVCIADGVCIDAFLKPPMETEEPQIFYNASPSTLS

SEQ ID NO: 112 - protein, 455 aa, artificial Sequence
  Hyaluronidase Variant
LNFRAPPVIPNVPFLWAWNAPSEFCLGKFDEPLDMSLFSFIGSPRINATGQGVTIFYVDRLGYYPYIDSITGVTVNGGIPQKISLQDHLDKAKKDITFYMPVDNLGMAVIDWEEWRPTWARNWKPKDVYKNRSIELVQQQNVQLSLTEATEKAKQEFEKAGKDFLVETIKLGKLLRPNHLWGYYLFPDCYNHHYKKPGYNGSCFNVEIKRNDDLSWLWNESTALYPSIYLNTQQSPVAATLYVRNRVREAIRVSKIPDAKSPLPVFAYTRIVFTDQVLKFLSQDELVYTFGETVALGASGIVIWGTLSITASKANCTKVKQFVSSDLNPYIINVTLAAKMCSQVLCQEQGVCIRKNWNSSDYLHLNPDNFAIQLEKGGKFTVRGKPTLEDLEQFSEKFYCSCYSTLSCKEKADVKDTDAVDVCIADGVCIDAFLKPPMETEEPQIFYNASPSTLS

SEQ ID NO: 113 - protein, 431 aa, artificial Sequence
  Hyaluronidase Variant
FRAPPVIPNVPFLWAWNAPSEFCLGKFDEPLDMSLFSFIGSPRINATGQGVTIFYVDRLGYYPYIDSITGVTVNGGIPQKISLQDHLDKAKKDITFYMPVDNLGMAVIDWEEWRPTWARNWKPKDVYKNRSIELVQQQNVQLSLTEATEKAKQEFEKAGKDFLVETIKLGKLLRPNHLWGYYLFPDCYNHHYKKPGYNGSCFNVEIKRNDDLSWLWNESTALYPSIYLNTQQSPVAATLYVRNRVREAIRVSKIPDAKSPLPVFAYTRIVFTDQVLKFLSQDELVYTFGETVALGASGIVIWGSWENTMTKESCQAIKEYMDTTLNPYIINVTLAAKMCSQVLCQEQGVCIRKNWNSSDYLHLNPDNFAIQLEKGGKFTVRGKPTLEDLEQFSEKFYCSCYSTLSCKEKADVKDTDAVDVCIADGVCIDAF

SEQ ID NO: 114 - protein, 431 aa, artificial Sequence
  Hyaluronidase Variant
FRAPPVIPNVPFLWAWNAPSEFCLGKFDEPLDMSLFSFIGSPRINATGQGVTIFYVDRLGYYPYIDSITGVTVNGGIPQKISLQDHLDKAKKDITFYMPVDNLGMAVIDWEEWRPTWARNWKPKDVYKNRSIELVQQQNVQLSLTEATEKAKQEFEKAGKDFLVETIKLGKLLRPNHLWGYYLFPDCYNHHYKKPGYNGSCFNVEIKRNDDLSWLWNESTALYPSIYLNTQQSPVAATLYVRNRVREAIRVSKIPDAKSPLPVFAYTRIVFTDQVLKFLSQDELVYTFGETVALGASGIVIWGSWENTRQKESCQAIKEYMDTTLNPYIINVTLAAKMCSQVLCQEQGVCIRKNWNSSDYLHLNPDNFAIQLEKGGKFTVRGKPTLEDLEQFSEKFYCSCYSTLSCKEKADVKDTDAVDVCIADGVCIDAF

SEQ ID NO: 115 - protein, 431 aa, artificial Sequence
  Hyaluronidase Variant
FRAPPVIPNVPFLWAWNAPSEFCLGKFDEPLDMSLFSFIGSPRINATGQGVTIFYVDRLGYYPYIDSITGVTVNGGIPQKISLQDHLDKAKKDITFYMPVDNLGMAVIDWEEWRPTWARNWKPKDVYKNRSIELVQQQNVQLSLTEATEKAKQEFEKAGKDFLVETIKLGKLLRPNHLWGYYLFPDCYNHHYKKPGYNGSCFNVEIKRNDDLSWLWNESTALYPSIYLNTQQSPVAATLYVRNRVREAIRVSKIPDAKSPLPVFAYTRIVFTDQVLKFLSQDELVYTFGETVALGASGIVIWGSWENTRTQESCQAIKEYMDTTLNPYIINVTLAAKMCSQVLCQEQGVCIRKNWNSSDYLHLNPDNFAIQLEKGGKFTVRGKPTLEDLEQFSEKFYCSCYSTLSCKEKADVKDTDAVDVCIADGVCIDAF

SEQ ID NO: 116 - protein, 431 aa, artificial Sequence
  Hyaluronidase Variant
FRAPPVIPNVPFLWAWNAPSEFCLGKFDEPLDMSLFSFIGSPRINATGQGVTIFYVDRLGYYPYIDSITGVTVNGGIPQKISLQDHLDKAKKDITFYMPVDNLGMAVIDWEEWRPTWARNWKPKDVYKNRSIELVQQQNVQLSLTEATEKAKQEFEKAGKDFLVETIKLGKLLRPNHLWGYYLFPDCYNHHYKKPGYNGSCFNVEIKRNDDLSWLWNESTALYPSIYLNTQQSPVAATLYVRNRVREAIRVSKIPDAKSPLPVFAYTRIVFTDQVLKFLSQDELVYTFGETVALGASGIVIWGSWENTRTKEQCQAIKEYMDTTLNPYIINVTLAAKMCSQVLCQEQGVCIRKNWNSSDYLHLNPDNFAIQLEKGGKFTVRGKPTLEDLEQFSEKFYCSCYSTLSCKEKADVKDTDAVDVCIADGVCIDAF

SEQ ID NO: 117 - protein, 431 aa, artificial Sequence
  Hyaluronidase Variant
FRAPPVIPNVPFLWAWNAPSEFCLGKFDEPLDMSLFSFIGSPRINATGQGVTIFYVDRLGYYPYIDSITGVTVNGGIPQKISLQDHLDKAKKDITFYMPVDNLGMAVIDWEEWRPTWARNWKPKDVYKNRSIELVQQQNVQLSLTEATEKAKQEFEKAGKDFLVETIKLGKLLRPNHLWGYYLFPDCYNHHYKKPGYNGSCFNVEIKRNDDLSWLWNESTALYPSIYLNTQQSPVAATLYVRNRVREAIRVSKIPDAKSPLPVFAYTRIVFTDQVLKFLSQDELVYTFGETVALGASGIVIWGSWENTRTKESCQAIQEYMDTTLNPYIINVTLAAKMCSQVLCQEQGVCIRKNWNSSDYLHLNPDNFAIQLEKGGKFTVRGKPTLEDLEQFSEKFYCSCYSTLSCKEKADVKDTDAVDVCIADGVCIDAF

SEQ ID NO: 118 - protein, 431 aa, artificial Sequence
  Hyaluronidase Variant
FRAPPVIPNVPFLWAWNAPSEFCLGKFDEPLDMSLFSFIGSPRINATGQGVTIFYVDRLGYYPYIDSITGVTVNGGIPQKISLQDHLDKAKKDITFYMPVDNLGMAVIDWEEWRPTWARNWKPKDVYKNRSIELVQQQNVQLSLTEATEKAKQEFEKAGKDFLVETIKLGKLLRPNHLWGYYLFPDCYNHHYKKPGYNGSCFNVEIKRNDDLSWLWNESTALYPSIYLNTQQSPVAATLYVRNRVREAIRVSKIPDAKSPLPVFAYTRIVFTDQVLKFLSQDELVYTFGETVALGASGIVIWGSWENTRTKESCQAIKEYVDTTLNPYIINVTLAAKMCSQVLCQEQGVCIRKNWNSSDYLHLNPDNFAIQLEKGGKFTVRGKPTLEDLEQFSEKFYCSCYSTLSCKEKADVKDTDAVDVCIADGVCIDAF

SEQ ID NO: 119 - protein, 431 aa, artificial Sequence
  Hyaluronidase Variant
FRAPPVIPNVPFLWAWNAPSEFCLGKFDEPLDMSLFSFIGSPRINATGQGVTIFYVDRLGYYPYIDSITGVTVNGGIPQKISLQDHLDKAKKDITFYMPVDNLGMAVIDWEEWRPTWARNWKPKDVYKNRSIELVQQQNVQLSLTEATEKAKQEFEKAGKDFLVETIKLGKLLRPNHLWGYYLFPDCYNHHYKKPGYNGSCFNVEIKRNDDLSWLWNESTALYPSIYLNTQQSPVAATLYVRNRVREAIRVSKIPDAKSPLPVFAYTRIVFTDQVLKFLSQDELVYTFGETVALGASGIVIWGSWENTRTKESCQAIKEYMDTTANPYIINVTLAAKMCSQVLCQEQGVCIRKNWNSSDYLHLNPDNFAIQLEKGGKFTVRGKPTLEDLEQFSEKFYCSCYSTLSCKEKADVKDTDAVDVCIADGVCIDAF

SEQ ID NO: 120 - protein, 431 aa, artificial Sequence
  Hyaluronidase Variant
FRAPPVIPNVPFLWAWNAPSEFCLGKFDEPLDMSLFSFIGSPRINATGQGVTIFYVDRLGYYPYIDSITGVTVNGGIPQKISLQDHLDKAKKDITFYMPVDNLGMAVIDWEEWRPTWARNWKPKDVYKNRSIELVQQQNVQLSLTEATEKAKQEFEKAGKDFLVETIKLGKLLRPNHLWGYYLFPDCYNHHYKKPGYNGSCFNVEIKRNDDLSWLWNESTALYPSIYLNTQQSPVAATLYVRNRVREAIRVSKIPDAKSPLPVFAYTRIVFTDQVLKFLSQDELVYTFGETVALGASGIVIWGSWVNTRTKESCQAIKEYMDTTLNPYIINVTLAAKMCSQVLCQEQGVCIRKNWNSSDYLHLNPDNFAIQLEKGGKFTVRGKPTLEDLEQFSEKFYCSCYSTLSCKEKADVKDTDAVDVCIADGVCIDAF

SEQ ID NO: 121 - protein, 431 aa, artificial Sequence
  Hyaluronidase Variant
FRAPPVIPNVPFLWAWNAPSEFCLGKFDEPLDMSLFSFIGSPRINATGQGVTIFYVDRLGYYPYIDSITGVTVNGGIPQKISLQDHLDKAKKDITFYMPVDNLGMAVIDWEEWRPTWARNWKPKDVYKNRSIELVQQQNVQLSLTEATEKAKQEFEKAGKDFLVETIKLGKLLRPNHLWGYYLFPDCYNHHYKKPGYNGSCFNVEIKRNDDLSWLWNESTALYPSIYLNTQQSPVAATLYVRNRVREAIRVSKIPDAKSPLPVFAYTRIVFTDQVLKFLSQDELVYTFGETVALGASGIVIWGSWEFTRTKESCQAIKEYMDTTLNPYIINVTLAAKMCSQVLCQEQGVCIRKNWNSSDYLHLNPDNFAIQLEKGGKFTVRGKPTLEDLEQFSEKFYCSCYSTLSCKEKADVKDTDAVDVCIADGVCIDAF

SEQ ID NO: 122 - protein, 431 aa, artificial Sequence
  Hyaluronidase Variant
FRAPPVIPNVPFLWAWNAPSEFCLGKFDEPLDMSLFSFIGSPRINATGQGVTIFYVDRLGYYPYIDSITGVTVNGGIPQKISLQDHLDKAKKDITFYMPVDNLGMAVIDWEEWRPTWARNWKPKDVYKNRSIELVQQQNVQLSLTEATEKAKQEFEKAGKDFLVETIKLGKLLRPNHLWGYYLFPDCYNHHYKKPGYNGSCFNVEIKRNDDLSWLWNESTALYPSIYLNTQQSPVAATLYVRNRVREAIRVSKIPDAKSPLPVFAYTRIVFTDQVLKFLSQDELVYTFGETVALGASGIVIWGSWENTRTKESCQAIKEYMKTTLNPYIINVTLAAKMCSQVLCQEQGVCIRKNWNSSDYLHLNPDNFAIQLEKGGKFTVRGKPTLEDLEQFSEKFYCSCYSTLSCKEKADVKDTDAVDVCIADGVCIDAF

SEQ ID NO: 123 - protein, 431 aa, artificial Sequence
  Hyaluronidase Variant
FRAPPVIPNVPFLWAWNAPSEFCLGKFDEPLDMSLFSFIGSPRINATGQGVTIFYVDRLGYYPYIDSITGVTVNGGIPQKISLQDHLDKAKKDITFYMPVDNLGMAVIDWEEWRPTWARNWKPKDVYKNRSIELVQQQNVQLSLTEATEKAKQEFEKAGKDFLVETIKLGKLLRPNHLWGYYLFPDCYNHHYKKPGYNGSCFNVEIKRNDDLSWLWNESTALYPSIYLNTQQSPVAATLYVRNRVREAIRVSKIPDAKSPLPVFAYTRIVFTDQVLKFLSQDELVYTFGETVALGASGIVIWGSWENTRTKESCQAIKEYMDYTLNPYIINVTLAAKMCSQVLCQEQGVCIRKNWNSSDYLHLNPDNFAIQLEKGGKFTVRGKPTLEDLEQFSEKFYCSCYSTLSCKEKADVKDTDAVDVCIADGVCIDAF

SEQ ID NO: 124 - protein, 431 aa, artificial Sequence
  Hyaluronidase Variant
FRAPPVIPNVPFLWAWNAPSEFCLGKFDEPLDMSLFSFIGSPRINATGQGVTIFYVDRLGYYPYIDSITGVTVNGGIPQKISLQDHLDKAKKDITFYMPVDNLGMAVIDWEEWRPTWARNWKPKDVYKNRSIELVQQQNVQLSLTEATEKAKQEFEKAGKDFLVETIKLGKLLRPNHLWGYYLFPDCYNHHYKKPGYNGSCFNVEIKRNDDLSWLWNESTALYPSIYLNTQQSPVAATLYVRNRVREAIRVSKIPDAKSPLPVFAYTRIVFTDQVLKFLSQDELVYTFGETVALGASGIVIWGSWENTRTKESCQAIKEYMDTMLNPYIINVTLAAKMCSQVLCQEQGVCIRKNWNSSDYLHLNPDNFAIQLEKGGKFTVRGKPTLEDLEQFSEKFYCSCYSTLSCKEKADVKDTDAVDVCIADGVCIDAF

SEQ ID NO: 125 - protein, 431 aa, artificial Sequence
  Hyaluronidase Variant
FRAPPVIPNVPFLWAWNAPSEFCLGKFDEPLDMSLFSFIGSPRINATGQGVTIFYVDRLGYYPYIDSITGVTVNGGIPQKISLQDHLDKAKKDITFYMPVDNLGMAVIDWEEWRPTWARNWKPKDVYKNRSIELVQQQNVQLSLTEATEKAKQEFEKAGKDFLVETIKLGKLLRPNHLWGYYLFPDCYNHHYKKPGYNGSCFNVEIKRNDDLSWLWNESTALYPSIYLNTQQSPVAATLYVRNRVREAIRVSKIPDAKSPLPVFAYTRIVFTDQVLKFLSQDELVYTFGETVALGASGIVIWGSWENTRTKESCEAIKEYMDTTLNPYIINVTLAAKMCSQVLCQEQGVCIRKNWNSSDYLHLNPDNFAIQLEKGGKFTVRGKPTLEDLEQFSEKFYCSCYSTLSCKEKADVKDTDAVDVCIADGVCIDAF

SEQ ID NO: 126 - protein, 431 aa, artificial Sequence
  Hyaluronidase Variant
FRAPPVIPNVPFLWAWNAPSEFCLGKFDEPLDMSLFSFIGSPRINATGQGVTIFYVDRLGYYPYIDSITGVTVNGGIPQKISLQDHLDKAKKDITFYMPVDNLGMAVIDWEEWRPTWARNWKPKDVYKNRSIELVQQQNVQLSLTEATEKAKQEFEKAGKDFLVETIKLGKLLRPNHLWGYYLFPDCYNHHYKKPGYNGSCFNVEIKRNDDLSWLWNESTALYPSIYLNTQQSPVAATLYVRNRVREAIRVSKIPDAKSPLPVFAYTRIVFTDQVLKFLSQDELVYTFGETVALGASGIVIWGSWENTRTKESCQAIKEYMDTTLMPYIINVTLAAKMCSQVLCQEQGVCIRKNWNSSDYLHLNPDNFAIQLEKGGKFTVRGKPTLEDLEQFSEKFYCSCYSTLSCKEKADVKDTDAVDVCIADGVCIDAF

SEQ ID NO: 127 - protein, 431 aa, artificial Sequence
  Hyaluronidase Variant
FRAPPVIPNVPFLWAWNAPSEFCLGKFDEPLDMSLFSFIGSPRINANGQGVTIFYVDRLGYYPYIDSITGVTVNGGIPQKISLQDHLDKAKKDITFYMPVDNLGMAVIDWEEWRPTWARNWKPKDVYKNRSIELVQQQNVQLSLTEATEKAKQEFEKAGKDFLVETIKLGKLLRPNHLWGYYLFPDCYNHHYKKPGYNGSCFNVEIKRNDDLSWLWNESTALYPSIYLNTQQSPVAATLYVRNRVREAIRVSKIPDAKSPLPVFAYTRIVFTDQVLKFLSQDELVYTFGETVALGASGIVIWGSWENTRTKESCQAIKEYMDTTLNPYIINVTLAAKMCSQVLCQEQGVCIRKNWNSSDYLHLNPDNFAIQLEKGGKFTVRGKPTLEDLEQFSEKFYCSCYSTLSCKEKADVKDTDAVDVCIADGVCIDAF

SEQ ID NO: 128 - protein, 431 aa, artificial Sequence
  Hyaluronidase Variant
FRAPPVIPNVPFLWAWNAPSEFCLGKFDEPLDMSLFSFIGSPRINATGQGVTIFYVDRLGYYPYIDSITGVTVNGGIPQKISLQDHLDKAKKDITFYMPVDNLGMAVIDWEEWRPTWARNWKPKDVYKKRSIELVQQQNVQLSLTEATEKAKQEFEKAGKDFLVETIKLGKLLRPNHLWGYYLFPDCYNHHYKKPGYNGSCFNVEIKRNDDLSWLWNESTALYPSIYLNTQQSPVAATLYVRNRVREAIRVSKIPDAKSPLPVFAYTRIVFTDQVLKFLSQDELVYTFGETVALGASGIVIWGSWENTRTKESCQAIKEYMDTTLNPYIINVTLAAKMCSQVLCQEQGVCIRKNWNSSDYLHLNPDNFAIQLEKGGKFTVRGKPTLEDLEQFSEKFYCSCYSTLSCKEKADVKDTDAVDVCIADGVCIDAF

SEQ ID NO: 129 - protein, 431 aa, artificial Sequence
  Hyaluronidase Variant
FRAPPVIPNVPFLWAWNAPSEFCLGKFDEPLDMSLFSFIGSPRINATGQGVTIFYVDRLGYYPYIDSITGVTVNGGIPQKISLQDHLDKAKKDITFYMPVDNLGMAVIDWEEWRPTWARNWKPKDVYKNRSIELVQQQNVQLSLTEATEKAKQEFEKAGKDFLVETIKLGKLLRPNHLWGYYLFPDCYNHHYKKPGYNGSCFNVEIKRNDDLSWLWNESTALYPSIYLNTQQSPVAATLYVRNRVREAIRVSKIPDAKSPLPVFAYTRIVFTDQVLKFLSQDELVYTFGETVALGASGIVIWGSWENTRTKESCQAEKEYMDTTLNPYIINVTLAAKMCSQVLCQEQGVCIRKNWNSSDYLHLNPDNFAIQLEKGGKFTVRGKPTLEDLEQFSEKFYCSCYSTLSCKEKADVKDTDAVDVCIADGVCIDAF

SEQ ID NO: 130 - protein, 431 aa, artificial Sequence
  Hyaluronidase Variant
FRAPPVIPNVPFLWAWNAPSEFCLGKFDEPLDMSLFSFIGSPRINATGQGVTIFYVDRLGYYPYIDSITGVTVNGGIPQKISLQDHLDKAKKDITFYMPVDNLGMAVIDWEEWRPTWARNWKPKDVYKNRSIELVQQQNVQLSLTEATEKAKQEFEKAGKDFLVETIKLGKLLRPNHLWGYYLFPDCYNHHYKKPGYNGSCFNVEIKRNDDLSWLWNESTALYPSIYLNTQQSPVAATLYVRNRVREAIRVSKIPDAKSPLPVFAYTRIVFTDQVLKFLSQDELVYTFGETVALGASGIVIWGSWENTRTKESCQAQKEYMDTTLNPYIINVTLAAKMCSQVLCQEQGVCIRKNWNSSDYLHLNPDNFAIQLEKGGKFTVRGKPTLEDLEQFSEKFYCSCYSTLSCKEKADVKDTDAVDVCIADGVCIDAF

SEQ ID NO: 131 - protein, 431 aa, artificial Sequence
  Hyaluronidase Variant
FRAPPVIPNVPFLWAWNAPSEFCLGKFDEPLDMSLFSFIGSPRINATGQGVTIFYVDRLGYYPYIDSITGVTVNGGIPQKISLQDHLDKAKKDITFYMPVDNLGMAVIDWEEWRPTWARNWKPKDVYKNRSIELVQQQNVQLSLTEATEKAKQEFEKAGKDFLVETIKLGKLLRPNHLWGYYLFPDCYNHHYKKPGYNGSCFNVEIKRNDDLSWLWNESTALYPSIYLNTQQSPVAATLYVRNRVREAIRVSKIPDAKSPLPVFAYTRIVFTDQVLKFLSQDELVYTFGETVALGASGIVIWGSWENTRTKESCQASKEYMDTTLNPYIINVTLAAKMCSQVLCQEQGVCIRKNWNSSDYLHLNPDNFAIQLEKGGKFTVRGKPTLEDLEQFSEKFYCSCYSTLSCKEKADVKDTDAVDVCIADGVCIDAF

SEQ ID NO: 132 - protein, 431 aa, artificial Sequence
  Hyaluronidase Variant
FRAPPVIPNVPFLWAWNAPSEFCLGKFDEPLDMSLFSFIGSPRINATGQGVTIFYVDRLGYYPYIDSITGVTVNGGIPQKISLQDHLDKAKKDITFYMPVDNLGMAVIDWEEWRPTWARNWKPKDVYKNRSIELVQQQNVQLSLTEATEKAKQEFEKAGKDFLVETIKLGKLLRPNHLWGYYLFPDCYNHHYKKPGYNGSCFNVEIKRNDDLSWLWNESTALYPSIYLNTQQSPVAATLYVRNRVREAIRVSKIPDAKSPLPVFAYTRIVFTDQVLKFLSQDELVYTFGETVALGASGIVIWGSWENTRTKESCQAVKEYMDTTLNPYIINVTLAAKMCSQVLCQEQGVCIRKNWNSSDYLHLNPDNFAIQLEKGGKFTVRGKPTLEDLEQFSEKFYCSCYSTLSCKEKADVKDTDAVDVCIADGVCIDAF

SEQ ID NO: 133 - protein, 431 aa, artificial Sequence
  Hyaluronidase Variant
FRAPPVIPNVPFLWAWNAPSEFCLGKFDEPLDMSLFSFIGSPRINATGQGVTIFYVDRLGYYPYIDSITGVTVNGGIPQKISLQDHLDKAKKDITFYMPVDNLGMAVIDWEEWRPTWARNWKPKDVYKNRSIELVQQQNVQLSLTEATEKAKQEFEKAGKDFLVETIKLGKLLRPNHLWGYYLFPDCYNHHYKKPGYNGSCFNVEIKRNDDLSWLWNESTALYPSIYLNTQQSPVAATLYVRNRVREAIRVSKIPDAKSPLPVFAYTRIVFTDQVLKFLSQDELVYTFGETVALGASGIVIWGSWENTRTKESCQAAKEYMDTTLNPYIINVTLAAKMCSQVLCQEQGVCIRKNWNSSDYLHLNPDNFAIQLEKGGKFTVRGKPTLEDLEQFSEKFYCSCYSTLSCKEKADVKDTDAVDVCIADGVCIDAF

SEQ ID NO: 134 - protein, 431 aa, artificial Sequence
  Hyaluronidase Variant
FRAPPVIPNVPFLWAWNAPSEFCLGKFDEPLDMSLFSFIGSPRINATGQGVTIFYVDRLGYYPYIDSITGVTVNGGIPQKISLQDHLDKAKKDITFYMPVDNLGMAVIDWEEWRPTWARNWKPKDVYKNRSIELVQQQNVQLSLTEATEKAKQEFEKAGKDFLVETIKLGKLLRPNHLWGYYLFPDCYNHHYKKPGYNGSCFNVEIKRNDDLSWLWNESTALYPSIYLNTQQSPVAATLYVRNRVREAIRVSKIPDAKSPLPVFAYTRIVFTDQVLKFLSQDELVYTFGETVALGASGIVIWGSWENTRTKESCQANKEYMDTTLNPYIINVTLAAKMCSQVLCQEQGVCIRKNWNSSDYLHLNPDNFAIQLEKGGKFTVRGKPTLEDLEQFSEKFYCSCYSTLSCKEKADVKDTDAVDVCIADGVCIDAF

SEQ ID NO: 135 - protein, 431 aa, artificial Sequence
  Hyaluronidase Variant
FRAPPVIPNVPFLWAWNAPSEFCLGKFDEPLDMSLFSFIGSPRINATGQGVTIFYVDRLGYYPYIDSITGVTVNGGIPQKISLQDHLDKAKKDITFYMPVDNLGMAVIDWEEWRPTWARNWKPKDVYKNRSIELVQQQNVQLSLTEATEKAKQEFEKAGKDFLVETIKLGKLLRPNHLWGYYLFPDCYNHHYKKPGYNGSCFNVEIKRNDDLSWLWNESTALYPSIYLNTQQSPVAATLYVRNRVREAIRVSKIPDAKSPLPVFAYTRIVFTDQVLKFLSQDELVYTFGETVALGASGIVIWGSWENTRTKESCQATKEYMDTTLNPYIINVTLAAKMCSQVLCQEQGVCIRKNWNSSDYLHLNPDNFAIQLEKGGKFTVRGKPTLEDLEQFSEKFYCSCYSTLSCKEKADVKDTDAVDVCIADGVCIDAF

SEQ ID NO: 136 - protein, 431 aa, artificial Sequence
  Hyaluronidase Variant
FRAPPVIPNVPFLWAWNAPSEFCLGKFDEPLDMSLFSFIGSPRINATGQGVTIFYVDRLGYYPYIDSITGVTVNGGIPQKISLQDHLDKAKKDITFYMPVDNLGMAVIDWEEWRPTWARNWKPKDVYKNRSIELVQQQNVQLSLTEATEKAKQEFEKAGKDFLVETIKLGKLLRPNHLWGYYLFPDCYNHHYKKPGYNGSCFNVEIKRNDDLSWLWNESTALYPSIYLNTQQSPVAATLYVRNRVREAIRVSKIPDAKSPLPVFAYTRIVFTDQVLKFLSQDELVYTFGETVALGASGIVIWGSWENTRTKESCQAIKMYMDTTLNPYIINVTLAAKMCSQVLCQEQGVCIRKNWNSSDYLHLNPDNFAIQLEKGGKFTVRGKPTLEDLEQFSEKFYCSCYSTLSCKEKADVKDTDAVDVCIADGVCIDAF

SEQ ID NO: 137 - protein, 431 aa, artificial Sequence
  Hyaluronidase Variant
FRAPPVIPNVPFLWAWNAPSEFCLGKFDEPLDMSLFSFIGSPRINATGQGVTIFYVDRLGYYPYIDSITGVTVNGGIPQKISLQDHLDKAKKDITFYMPVDNLGMAVIDWEEWRPTWARNWKPKDVYKNRSIELVQQQNVQLSLTEATEKAKQEFEKAGKDFLVETIKLGKLLRPNHLWGYYLFPDCYNHHYKKPGYNGSCFNVEIKRNDDLSWLWNESTALYPSIYLNTQQSPVAATLYVRNRVREAIRVSKIPDAKSPLPVFAYTRIVFTDQVLKFLSQDELVYTFGETVALGASGIVIWGSWENTRTKESCQAIKFYMDTTLNPYIINVTLAAKMCSQVLCQEQGVCIRKNWNSSDYLHLNPDNFAIQLEKGGKFTVRGKPTLEDLEQFSEKFYCSCYSTLSCKEKADVKDTDAVDVCIADGVCIDAF

SEQ ID NO: 138 - protein, 431 aa, artificial Sequence
  Hyaluronidase Variant
FRAPPVIPNVPFLWAWNAPSEFCLGKFDEPLDMSLFSFIGSPRINATGQGVTIFYVDRLGYYPYIDSITGVTVNGGIPQKISLQDHLDKAKKDITFYMPVDNLGMAVIDWEEWRPTWARNWKPKDVYKNRSIELVQQQNVQLSLTEATEKAKQEFEKAGKDFLVETIKLGKLLRPNHLWGYYLFPDCYNHHYKKPGYNGSCFNVEIKRNDDLSWLWNESTALYPSIYLNTQQSPVAATLYVRNRVREAIRVSKIPDAKSPLPVFAYTRIVFTDQVLKFLSQDELVYTFGETVALGASGIVIWGSWENTRTKESCQAIKIYMDTTLNPYIINVTLAAKMCSQVLCQEQGVCIRKNWNSSDYLHLNPDNFAIQLEKGGKFTVRGKPTLEDLEQFSEKFYCSCYSTLSCKEKADVKDTDAVDVCIADGVCIDAF

SEQ ID NO: 139 - protein, 431 aa, artificial Sequence
  Hyaluronidase Variant
FRAPPVIPNVPFLWAWNAPSEFCLGKFDEPLDMSLFSFIGSPRINATGQGVTIFYVDRLGYYPYIDSITGVTVNGGIPQKISLQDHLDKAKKDITFYMPVDNLGMAVIDWEEWRPTWARNWKPKDVYKNRSIELVQQQNVQLSLTEATEKAKQEFEKAGKDFLVETIKLGKLLRPNHLWGYYLFPDCYNHHYKKPGYNGSCFNVEIKRNDDLSWLWNESTALYPSIYLNTQQSPVAATLYVRNRVREAIRVSKIPDAKSPLPVFAYTRIVFTDQVLKFLSQDELVYTFGETVALGASGIVIWGSWENTRTKESCQAIKLYMDTTLNPYIINVTLAAKMCSQVLCQEQGVCIRKNWNSSDYLHLNPDNFAIQLEKGGKFTVRGKPTLEDLEQFSEKFYCSCYSTLSCKEKADVKDTDAVDVCIADGVCIDAF

SEQ ID NO: 140 - protein, 431 aa, artificial Sequence
  Hyaluronidase Variant
FRAPPVIPNVPFLWAWNAPSEFCLGKFDEPLDMSLFSFIGSPRINATGQGVTIFYVDRLGYYPYIDSITGVTVNGGIPQKISLQDHLDKAKKDITFYMPVDNLGMAVIDWEEWRPTWARNWKPKDVYKNRSIELVQQQNVQLSLTEATEKAKQEFEKAGKDFLVETIKLGKLLRPNHLWGYYLFPDCYNHHYKKPGYNGSCFNVEIKRNDDLSWLWNESTALYPSIYLNTQQSPVAATLYVRNRVREAIRVSKIPDAKSPLPVFAYTRIVFTDQVLKFLSQDELVYTFGETVALGASGIVIWGSWENTRTKESCQAIKQYMDTTLNPYIINVTLAAKMCSQVLCQEQGVCIRKNWNSSDYLHLNPDNFAIQLEKGGKFTVRGKPTLEDLEQFSEKFYCSCYSTLSCKEKADVKDTDAVDVCIADGVCIDAF

SEQ ID NO: 141 - protein, 431 aa, artificial Sequence
  Hyaluronidase Variant
FRAPPVIPNVPFLWAWNAPSEFCLGKFDEPLDMSLFSFIGSPRINATGQGVTIFYVDRLGYYPYIDSITGVTVNGGIPQKISLQDHLDKAKKDITFYMPVDNLGMAVIDWEEWRPTWARNWKPKDVYKNRSIELVQQQNVQLSLTEATEKAKQEFEKAGKDFLVETIKLGKLLRPNHLWGYYLFPDCYNHHYKKPGYNGSCFNVEIKRNDDLSWLWNESTALYPSIYLNTQQSPVAATLYVRNRVREAIRVSKIPDAKSPLPVFAYTRIVFTDQVLKFLSQDELVYTFGETVALGASGIVIWGSWENTRTKESCQAIKVYMDTTLNPYIINVTLAAKMCSQVLCQEQGVCIRKNWNSSDYLHLNPDNFAIQLEKGGKFTVRGKPTLEDLEQFSEKFYCSCYSTLSCKEKADVKDTDAVDVCIADGVCIDAF

SEQ ID NO: 142 - protein, 431 aa, artificial Sequence
  Hyaluronidase Variant
FRAPPVIPNVPFLWAWNAPSEFCLGKFDEPLDMSLFSFIGSPRINATGQGVTIFYVDRLGYYPYIDSITGVTVNGGIPQKISLQDHLDKAKKDITFYMPVDNLGMAVIDWEEWRPTWARNWKPKDVYKKRSIELVQQQNVQLSLTEATEKAKQEFEKAGKDFLVETIKLGKLLRPNHLWGYYLFPDCYNHHYKKPGYNGSCFNVEIKRNDDLSWLWNESTALYPSIYLNTQQSPVAATLYVRNRVREAIRVSKIPDAKSPLPVFAYTRIVFTDQVLKFLSQDELVYTFGETVALGASGIVIWGSWVNTRTKESCQAIKEYMDTMLNPYIINVTLAAKMCSQVLCQEQGVCIRKNWNSSDYLHLNPDNFAIQLEKGGKFTVRGKPTLEDLEQFSEKFYCSCYSTLSCKEKADVKDTDAVDVCIADGVCIDAF

SEQ ID NO: 143 - protein, 431 aa, artificial Sequence
  Hyaluronidase Variant
FRAPPVIPNVPFLWAWNAPSEFCLGKFDEPLDMSLFSFIGSPRINATGQGVTIFYVDRLGYYPYIDSITGVTVNGGIPQKISLQDHLDKAKKDITFYMPVDNLGMAVIDWEEWRPTWARNWKPKDVYKNRSIELVQQQNVQLSLTEATEKAKQEFEKAGKDFLVETIKLGKLLRPNHLWGYYLFPDCYNHHYKKPGYNGSCFNVEIKRNDDLSWLWNESTALYPSIYLNTQQSPVAATLYVRNRVREAIRVSKIPDAKSPLPVFAYTRIVFTDQVLKFLSQDELVYTFGETVALGASGIVIWQSWENTRTKESCQAIKEYMDTTLNPYIINVTLAAKMCSQVLCQEQGVCIRKNWNSSDYLHLNPDNFAIQLEKGGKFTVRGKPTLEDLEQFSEKFYCSCYSTLSCKEKADVKDTDAVDVCIADGVCIDAF

SEQ ID NO: 144 - protein, 431 aa, artificial Sequence
  Hyaluronidase Variant
FRAPPVIPNVPFLWAWNAPSEFCLGKFDEPLDMSLFSFIGSPRINATGQGVTIFYVDRLGYYPYIDSITGVTVNGGIPQKISLQDHLDKAKKDITFYMPVDNLGMAVIDWEEWRPTWARNWKPKDVYKNRSIELVQQQNVQLSLTEATEKAKQEFEKAGKDFLVETIKLGKLLRPNHLWGYYLFPDCYNHHYKKPGYNGSCFNVEIKRNDDLSWLWNESTALYPSIYLNTQQSPVAATLYVRNRVREAIRVSKIPDAKSPLPVFAYTRIVFTDQVLKFLSQDELVYTFGETVALGASGIVIWGHWENTRTKESCQAIKEYMDTTLNPYIINVTLAAKMCSQVLCQEQGVCIRKNWNSSDYLHLNPDNFAIQLEKGGKFTVRGKPTLEDLEQFSEKFYCSCYSTLSCKEKADVKDTDAVDVCIADGVCIDAF

SEQ ID NO: 145 - protein, 431 aa, artificial Sequence
  Hyaluronidase Variant
FRAPPVIPNVPFLWAWNAPSEFCLGKFDEPLDMSLFSFIGSPRINATGQGVTIFYVDRLGYYPYIDSITGVTVNGGIPQKISLQDHLDKAKKDITFYMPVDNLGMAVIDWEEWRPTWARNWKPKDVYKNRSIELVQQQNVQLSLTEATEKAKQEFEKAGKDFLVETIKLGKLLRPNHLWGYYLFPDCYNHHYKKPGYNGSCFNVEIKRNDDLSWLWNESTALYPSIYLNTQQSPVAATLYVRNRVREAIRVSKIPDAKSPLPVFAYTRIVFTDQVLKFLSQDELVYTFGETVALGASGIVIWGSIENTRTKESCQAIKEYMDTTLNPYIINVTLAAKMCSQVLCQEQGVCIRKNWNSSDYLHLNPDNFAIQLEKGGKFTVRGKPTLEDLEQFSEKFYCSCYSTLSCKEKADVKDTDAVDVCIADGVCIDAF

SEQ ID NO: 146 - protein, 431 aa, artificial Sequence
  Hyaluronidase Variant
FRAPPVIPNVPFLWAWNAPSEFCLGKFDEPLDMSLFSFIGSPRINATGQGVTIFYVDRLGYYPYIDSITGVTVNGGIPQKISLQDHLDKAKKDITFYMPVDNLGMAVIDWEEWRPTWARNWKPKDVYKNRSIELVQQQNVQLSLTEATEKAKQEFEKAGKDFLVETIKLGKLLRPNHLWGYYLFPDCYNHHYKKPGYNGSCFNVEIKRNDDLSWLWNESTALYPSIYLNTQQSPVAATLYVRNRVREAIRVSKIPDAKSPLPVFAYTRIVFTDQVLKFLSQDELVYTFGETVALGASGIVIWGSWYNTRTKESCQAIKEYMDTTLNPYIINVTLAAKMCSQVLCQEQGVCIRKNWNSSDYLHLNPDNFAIQLEKGGKFTVRGKPTLEDLEQFSEKFYCSCYSTLSCKEKADVKDTDAVDVCIADGVCIDAF

SEQ ID NO: 147 - protein, 431 aa, artificial Sequence
  Hyaluronidase Variant
FRAPPVIPNVPFLWAWNAPSEFCLGKFDEPLDMSLFSFIGSPRINATGQGVTIFYVDRLGYYPYIDSITGVTVNGGIPQKISLQDHLDKAKKDITFYMPVDNLGMAVIDWEEWRPTWARNWKPKDVYKNRSIELVQQQNVQLSLTEATEKAKQEFEKAGKDFLVETIKLGKLLRPNHLWGYYLFPDCYNHHYKKPGYNGSCFNVEIKRNDDLSWLWNESTALYPSIYLNTQQSPVAATLYVRNRVREAIRVSKIPDAKSPLPVFAYTRIVFTDQVLKFLSQDELVYTFGETVALGASGIVIWGSWENERTKESCQAIKEYMDTTLNPYIINVTLAAKMCSQVLCQEQGVCIRKNWNSSDYLHLNPDNFAIQLEKGGKFTVRGKPTLEDLEQFSEKFYCSCYSTLSCKEKADVKDTDAVDVCIADGVCIDAF

SEQ ID NO: 148 - protein, 431 aa, artificial Sequence
  Hyaluronidase Variant
FRAPPVIPNVPFLWAWNAPSEFCLGKFDEPLDMSLFSFIGSPRINATGQGVTIFYVDRLGYYPYIDSITGVTVNGGIPQKISLQDHLDKAKKDITFYMPVDNLGMAVIDWEEWRPTWARNWKPKDVYKNRSIELVQQQNVQLSLTEATEKAKQEFEKAGKDFLVETIKLGKLLRPNHLWGYYLFPDCYNHHYKKPGYNGSCFNVEIKRNDDLSWLWNESTALYPSIYLNTQQSPVAATLYVRNRVREAIRVSKIPDAKSPLPVFAYTRIVFTDQVLKFLSQDELVYTFGETVALGASGIVIWGSWENTFTKESCQAIKEYMDTTLNPYIINVTLAAKMCSQVLCQEQGVCIRKNWNSSDYLHLNPDNFAIQLEKGGKFTVRGKPTLEDLEQFSEKFYCSCYSTLSCKEKADVKDTDAVDVCIADGVCIDAF

SEQ ID NO: 149 - protein, 431 aa, artificial Sequence
  Hyaluronidase Variant
FRAPPVIPNVPFLWAWNAPSEFCLGKFDEPLDMSLFSFIGSPRINATGQGVTIFYVDRLGYYPYIDSITGVTVNGGIPQKISLQDHLDKAKKDITFYMPVDNLGMAVIDWEEWRPTWARNWKPKDVYKNRSIELVQQQNVQLSLTEATEKAKQEFEKAGKDFLVETIKLGKLLRPNHLWGYYLFPDCYNHHYKKPGYNGSCFNVEIKRNDDLSWLWNESTALYPSIYLNTQQSPVAATLYVRNRVREAIRVSKIPDAKSPLPVFAYTRIVFTDQVLKFLSQDELVYTFGETVALGASGIVIWGSWENTREKESCQAIKEYMDTTLNPYIINVTLAAKMCSQVLCQEQGVCIRKNWNSSDYLHLNPDNFAIQLEKGGKFTVRGKPTLEDLEQFSEKFYCSCYSTLSCKEKADVKDTDAVDVCIADGVCIDAF

SEQ ID NO: 150 - protein, 431 aa, artificial Sequence
  Hyaluronidase Variant
FRAPPVIPNVPFLWAWNAPSEFCLGKFDEPLDMSLFSFIGSPRINATGQGVTIFYVDRLGYYPYIDSITGVTVNGGIPQKISLQDHLDKAKKDITFYMPVDNLGMAVIDWEEWRPTWARNWKPKDVYKNRSIELVQQQNVQLSLTEATEKAKQEFEKAGKDFLVETIKLGKLLRPNHLWGYYLFPDCYNHHYKKPGYNGSCFNVEIKRNDDLSWLWNESTALYPSIYLNTQQSPVAATLYVRNRVREAIRVSKIPDAKSPLPVFAYTRIVFTDQVLKFLSQDELVYTFGETVALGASGIVIWGSWENTRTKLSCQAIKEYMDTTLNPYIINVTLAAKMCSQVLCQEQGVCIRKNWNSSDYLHLNPDNFAIQLEKGGKFTVRGKPTLEDLEQFSEKFYCSCYSTLSCKEKADVKDTDAVDVCIADGVCIDAF

SEQ ID NO: 151 - protein, 431 aa, artificial Sequence
  Hyaluronidase Variant
FRAPPVIPNVPFLWAWNAPSEFCLGKFDEPLDMSLFSFIGSPRINATGQGVTIFYVDRLGYYPYIDSITGVTVNGGIPQKISLQDHLDKAKKDITFYMPVDNLGMAVIDWEEWRPTWARNWKPKDVYKNRSIELVQQQNVQLSLTEATEKAKQEFEKAGKDFLVETIKLGKLLRPNHLWGYYLFPDCYNHHYKKPGYNGSCFNVEIKRNDDLSWLWNESTALYPSIYLNTQQSPVAATLYVRNRVREAIRVSKIPDAKSPLPVFAYTRIVFTDQVLKFLSQDELVYTFGETVALGASGIVIWGSWENTRTKEICQAIKEYMDTTLNPYIINVTLAAKMCSQVLCQEQGVCIRKNWNSSDYLHLNPDNFAIQLEKGGKFTVRGKPTLEDLEQFSEKFYCSCYSTLSCKEKADVKDTDAVDVCIADGVCIDAF

SEQ ID NO: 152 - protein, 431 aa, artificial Sequence
  Hyaluronidase Variant
FRAPPVIPNVPFLWAWNAPSEFCLGKFDEPLDMSLFSFIGSPRINATGQGVTIFYVDRLGYYPYIDSITGVTVNGGIPQKISLQDHLDKAKKDITFYMPVDNLGMAVIDWEEWRPTWARNWKPKDVYKNRSIELVQQQNVQLSLTEATEKAKQEFEKAGKDFLVETIKLGKLLRPNHLWGYYLFPDCYNHHYKKPGYNGSCFNVEIKRNDDLSWLWNESTALYPSIYLNTQQSPVAATLYVRNRVREAIRVSKIPDAKSPLPVFAYTRIVFTDQVLKFLSQDELVYTFGETVALGASGIVIWGSWENTRTKESCGAIKEYMDTTLNPYIINVTLAAKMCSQVLCQEQGVCIRKNWNSSDYLHLNPDNFAIQLEKGGKFTVRGKPTLEDLEQFSEKFYCSCYSTLSCKEKADVKDTDAVDVCIADGVCIDAF

SEQ ID NO: 153 - protein, 431 aa, artificial Sequence
  Hyaluronidase Variant
FRAPPVIPNVPFLWAWNAPSEFCLGKFDEPLDMSLFSFIGSPRINATGQGVTIFYVDRLGYYPYIDSITGVTVNGGIPQKISLQDHLDKAKKDITFYMPVDNLGMAVIDWEEWRPTWARNWKPKDVYKNRSIELVQQQNVQLSLTEATEKAKQEFEKAGKDFLVETIKLGKLLRPNHLWGYYLFPDCYNHHYKKPGYNGSCFNVEIKRNDDLSWLWNESTALYPSIYLNTQQSPVAATLYVRNRVREAIRVSKIPDAKSPLPVFAYTRIVFTDQVLKFLSQDELVYTFGETVALGASGIVIWGSWENTRTKESCQARKEYMDTTLNPYIINVTLAAKMCSQVLCQEQGVCIRKNWNSSDYLHLNPDNFAIQLEKGGKFTVRGKPTLEDLEQFSEKFYCSCYSTLSCKEKADVKDTDAVDVCIADGVCIDAF

SEQ ID NO: 154 - protein, 431 aa, artificial Sequence
  Hyaluronidase Variant
FRAPPVIPNVPFLWAWNAPSEFCLGKFDEPLDMSLFSFIGSPRINATGQGVTIFYVDRLGYYPYIDSITGVTVNGGIPQKISLQDHLDKAKKDITFYMPVDNLGMAVIDWEEWRPTWARNWKPKDVYKNRSIELVQQQNVQLSLTEATEKAKQEFEKAGKDFLVETIKLGKLLRPNHLWGYYLFPDCYNHHYKKPGYNGSCFNVEIKRNDDLSWLWNESTALYPSIYLNTQQSPVAATLYVRNRVREAIRVSKIPDAKSPLPVFAYTRIVFTDQVLKFLSQDELVYTFGETVALGASGIVIWGSWENTRTKESCQAIKEYRDTTLNPYIINVTLAAKMCSQVLCQEQGVCIRKNWNSSDYLHLNPDNFAIQLEKGGKFTVRGKPTLEDLEQFSEKFYCSCYSTLSCKEKADVKDTDAVDVCIADGVCIDAF

SEQ ID NO: 155 - protein, 431 aa, artificial Sequence
  Hyaluronidase Variant
FRAPPVIPNVPFLWAWNAPSEFCLGKFDEPLDMSLFSFIGSPRINATGQGVTIFYVDRLGYYPYIDSITGVTVNGGIPQKISLQDHLDKAKKDITFYMPVDNLGMAVIDWEEWRPTWARNWKPKDVYKNRSIELVQQQNVQLSLTEATEKAKQEFEKAGKDFLVETIKLGKLLRPNHLWGYYLFPDCYNHHYKKPGYNGSCFNVEIKRNDDLSWLWNESTALYPSIYLNTQQSPVAATLYVRNRVREAIRVSKIPDAKSPLPVFAYTRIVFTDQVLKFLSQDELVYTFGETVALGASGIVIWGSWENTRTKESCQAIKEYMVTTLNPYIINVTLAAKMCSQVLCQEQGVCIRKNWNSSDYLHLNPDNFAIQLEKGGKFTVRGKPTLEDLEQFSEKFYCSCYSTLSCKEKADVKDTDAVDVCIADGVCIDAF

SEQ ID NO: 156 - protein, 431 aa, artificial Sequence
  Hyaluronidase Variant
FRAPPVIPNVPFLWAWNAPSEFCLGKFDEPLDMSLFSFIGSPRINATGQGVTIFYVDRLGYYPYIDSITGVTVNGGIPQKISLQDHLDKAKKDITFYMPVDNLGMAVIDWEEWRPTWARNWKPKDVYKNRSIELVQQQNVQLSLTEATEKAKQEFEKAGKDFLVETIKLGKLLRPNHLWGYYLFPDCYNHHYKKPGYNGSCFNVEIKRNDDLSWLWNESTALYPSIYLNTQQSPVAATLYVRNRVREAIRVSKIPDAKSPLPVFAYTRIVFTDQVLKFLSQDELVYTFGETVALGASGIVIWGSWENTRTKESCQAIKEYMDRTLNPYIINVTLAAKMCSQVLCQEQGVCIRKNWNSSDYLHLNPDNFAIQLEKGGKFTVRGKPTLEDLEQFSEKFYCSCYSTLSCKEKADVKDTDAVDVCIADGVCIDAF

SEQ ID NO: 157 - protein, 431 aa, artificial Sequence
  Hyaluronidase Variant
FRAPPVIPNVPFLWAWNAPSEFCLGKFDEPLDMSLFSFIGSPRINATGQGVTIFYVDRLGYYPYIDSITGVTVNGGIPQKISLQDHLDKAKKDITFYMPVDNLGMAVIDWEEWRPTWARNWKPKDVYKNRSIELVQQQNVQLSLTEATEKAKQEFEKAGKDFLVETIKLGKLLRPNHLWGYYLFPDCYNHHYKKPGYNGSCFNVEIKRNDDLSWLWNESTALYPSIYLNTQQSPVAATLYVRNRVREAIRVSKIPDAKSPLPVFAYTRIVFTDQVLKFLSQDELVYTFGETVALGASGIVIWGSWENKRTKESCQAIKEYMDTTLNPYIINVTLAAKMCSQVLCQEQGVCIRKNWNSSDYLHLNPDNFAIQLEKGGKFTVRGKPTLEDLEQFSEKFYCSCYSTLSCKEKADVKDTDAVDVCIADGVCIDAF

SEQ ID NO: 158 - protein, 431 aa, artificial Sequence
  Hyaluronidase Variant
FRAPPVIPNVPFLWAWNAPSEFCLGKFDEPLDMSLFSFIGSPRINATGQGVTIFYVDRLGYYPYIDSITGVTVNGGIPQKISLQDHLDKAKKDITFYMPVDNLGMAVIDWEEWRPTWARNWKPKDVYKNRSIELVQQQNVQLSLTEATEKAKQEFEKAGKDFLVETIKLGKLLRPNHLWGYYLFPDCYNHHYKKPGYNGSCFNVEIKRNDDLSWLWNESTALYPSIYLNTQQSPVAATLYVRNRVREAIRVSKIPDAKSPLPVFAYTRIVFTDQVLKFLSQDELVYTFGETVALGASGIVIWGSWENTLTKESCQAIKEYMDTTLNPYIINVTLAAKMCSQVLCQEQGVCIRKNWNSSDYLHLNPDNFAIQLEKGGKFTVRGKPTLEDLEQFSEKFYCSCYSTLSCKEKADVKDTDAVDVCIADGVCIDAF

SEQ ID NO: 159 - protein, 431 aa, artificial Sequence
  Hyaluronidase Variant
FRAPPVIPNVPFLWAWNAPSEFCLGKFDEPLDMSLFSFIGSPRINATGQGVTIFYVDRLGYYPYIDSITGVTVNGGIPQKISLQDHLDKAKKDITFYMPVDNLGMAVIDWEEWRPTWARNWKPKDVYKNRSIELVQQQNVQLSLTEATEKAKQEFEKAGKDFLVETIKLGKLLRPNHLWGYYLFPDCYNHHYKKPGYNGSCFNVEIKRNDDLSWLWNESTALYPSIYLNTQQSPVAATLYVRNRVREAIRVSKIPDAKSPLPVFAYTRIVFTDQVLKFLSQDELVYTFGETVALGASGIVIWGSWENTRVKESCQAIKEYMDTTLNPYIINVTLAAKMCSQVLCQEQGVCIRKNWNSSDYLHLNPDNFAIQLEKGGKFTVRGKPTLEDLEQFSEKFYCSCYSTLSCKEKADVKDTDAVDVCIADGVCIDAF

SEQ ID NO: 160 - protein, 431 aa, artificial Sequence
  Hyaluronidase Variant
FRAPPVIPNVPFLWAWNAPSEFCLGKFDEPLDMSLFSFIGSPRINATGQGVTIFYVDRLGYYPYIDSITGVTVNGGIPQKISLQDHLDKAKKDITFYMPVDNLGMAVIDWEEWRPTWARNWKPKDVYKNRSIELVQQQNVQLSLTEATEKAKQEFEKAGKDFLVETIKLGKLLRPNHLWGYYLFPDCYNHHYKKPGYNGSCFNVEIKRNDDLSWLWNESTALYPSIYLNTQQSPVAATLYVRNRVREAIRVSKIPDAKSPLPVFAYTRIVFTDQVLKFLSQDELVYTFGETVALGASGIVIWGSWENTRTKWSCQAIKEYMDTTLNPYIINVTLAAKMCSQVLCQEQGVCIRKNWNSSDYLHLNPDNFAIQLEKGGKFTVRGKPTLEDLEQFSEKFYCSCYSTLSCKEKADVKDTDAVDVCIADGVCIDAF

SEQ ID NO: 161 - protein, 431 aa, artificial Sequence
  Hyaluronidase Variant
FRAPPVIPNVPFLWAWNAPSEFCLGKFDEPLDMSLFSFIGSPRINATGQGVTIFYVDRLGYYPYIDSITGVTVNGGIPQKISLQDHLDKAKKDITFYMPVDNLGMAVIDWEEWRPTWARNWKPKDVYKNRSIELVQQQNVQLSLTEATEKAKQEFEKAGKDFLVETIKLGKLLRPNHLWGYYLFPDCYNHHYKKPGYNGSCFNVEIKRNDDLSWLWNESTALYPSIYLNTQQSPVAATLYVRNRVREAIRVSKIPDAKSPLPVFAYTRIVFTDQVLKFLSQDELVYTFGETVALGASGIVIWGSWENTRTKESCQAWKEYMDTTLNPYIINVTLAAKMCSQVLCQEQGVCIRKNWNSSDYLHLNPDNFAIQLEKGGKFTVRGKPTLEDLEQFSEKFYCSCYSTLSCKEKADVKDTDAVDVCIADGVCIDAF

SEQ ID NO: 162 - protein, 431 aa, artificial Sequence
  Hyaluronidase Variant
FRAPPVIPNVPFLWAWNAPSEFCLGKFDEPLDMSLFSFIGSPRINATGQGVTIFYVDRLGYYPYIDSITGVTVNGGIPQKISLQDHLDKAKKDITFYMPVDNLGMAVIDWEEWRPTWARNWKPKDVYKNRSIELVQQQNVQLSLTEATEKAKQEFEKAGKDFLVETIKLGKLLRPNHLWGYYLFPDCYNHHYKKPGYNGSCFNVEIKRNDDLSWLWNESTALYPSIYLNTQQSPVAATLYVRNRVREAIRVSKIPDAKSPLPVFAYTRIVFTDQVLKFLSQDELVYTFGETVALGASGIVIWGSWENTRTKESCQAIKEYMYTTLNPYIINVTLAAKMCSQVLCQEQGVCIRKNWNSSDYLHLNPDNFAIQLEKGGKFTVRGKPTLEDLEQFSEKFYCSCYSTLSCKEKADVKDTDAVDVCIADGVCIDAF

SEQ ID NO: 163 - protein, 431 aa, artificial Sequence
  Hyaluronidase Variant
FRAPPVIPNVPFLWAWNAPSEFCLGKFDEPLDMSLFSFIGSPRINATGQGVTIFYVDRLGYYPYIDSITGVTVNGGIPQKISLQDHLDKAKKDITFYMPVDNLGMAVIDWEEWRPTWARNWKPKDVYKNRSIELVQQQNVQLSLTEATEKAKQEFEKAGKDFLVETIKLGKLLRPNHLWGYYLFPDCYNHHYKKPGYNGSCFNVEIKRNDDLSWLWNESTALYPSIYLNTQQSPVAATLYVRNRVREAIRVSKIPDAKSPLPVFAYTRIVFTDQVLKFLSQDELVYTFGETVALGASGIVIWGSWENTRWKESCQAIKEYMDTTLNPYIINVTLAAKMCSQVLCQEQGVCIRKNWNSSDYLHLNPDNFAIQLEKGGKFTVRGKPTLEDLEQFSEKFYCSCYSTLSCKEKADVKDTDAVDVCIADGVCIDAF

SEQ ID NO: 164 - protein, 431 aa, artificial Sequence
  Hyaluronidase Variant
FRAPPVIPNVPFLWAWNAPSEFCLGKFDEPLDMSLFSFIGSPRINATGQGVTIFYVDRLGYYPYIDSITGVTVNGGIPQKISLQDHLDKAKKDITFYMPVDNLGMAVIDWEEWRPTWARNWKPKDVYKNRSIELVQQQNVQLSLTEATEKAKQEFEKAGKDFLVETIKLGKLLRPNHLWGYYLFPDCYNHHYKKPGYNGSCFNVEIKRNDDLSWLWNESTALYPSIYLNTQQSPVAATLYVRNRVREAIRVSKIPDAKSPLPVFAYTRIVFTDQVLKFLSQDELVYTFGETVALGASGIVIWGSWENTRTKESCQAIKEWMDTTLNPYIINVTLAAKMCSQVLCQEQGVCIRKNWNSSDYLHLNPDNFAIQLEKGGKFTVRGKPTLEDLEQFSEKFYCSCYSTLSCKEKADVKDTDAVDVCIADGVCIDAF

SEQ ID NO: 165 - protein, 431 aa, artificial Sequence
  Hyaluronidase Variant
FRAPPVIPNVPFLWAWNAPSEFCLGKFDEPLDMSLFSFIGSPRINATGQGVTIFYVDRLGYYPYIDSITGVTVNGGIPQKISLQDHLDKAKKDITFYMPVDNLGMAVIDWEEWRPTWARNWKPKDVYKNRSIELVQQQNVQLSLTEATEKAKQEFEKAGKDFLVETIKLGKLLRPNHLWGYYLFPDCYNHHYKKPGYNGSCFNVEIKRNDDLSWLWNESTALYPSIYLNTQQSPVAATLYVRNRVREAIRVSKIPDAKSPLPVFAYTRIVFTDQVLKFLSQDELVYTFGETVALGASGIVIWGSDENTRTKESCQAIKEYMDTTLNPYIINVTLAAKMCSQVLCQEQGVCIRKNWNSSDYLHLNPDNFAIQLEKGGKFTVRGKPTLEDLEQFSEKFYCSCYSTLSCKEKADVKDTDAVDVCIADGVCIDAF

SEQ ID NO: 166 - protein, 431 aa, artificial Sequence
  Hyaluronidase Variant
FRAPPVIPNVPFLWAWNAPSEFCLGKFDEPLDMSLFSFIGSPRINATGQGVTIFYVDRLGYYPYIDSITGVTVNGGIPQKISLQDHLDKAKKDITFYMPVDNLGMAVIDWEEWRPTWARNWKPKDVYKNRSIELVQQQNVQLSLTEATEKAKQEFEKAGKDFLVETIKLGKLLRPNHLWGYYLFPDCYNHHYKKPGYNGSCFNVEIKRNDDLSWLWNESTALYPSIYLNTQQSPVAATLYVRNRVREAIRVSKIPDAKSPLPVFAYTRIVFTDQVLKFLSQDELVYTFGETVALGASGIVIWGSWQNTRTKESCQAIKEYMDTTLNPYIINVTLAAKMCSQVLCQEQGVCIRKNWNSSDYLHLNPDNFAIQLEKGGKFTVRGKPTLEDLEQFSEKFYCSCYSTLSCKEKADVKDTDAVDVCIADGVCIDAF

SEQ ID NO: 167 - protein, 431 aa, artificial Sequence
  Hyaluronidase Variant
FRAPPVIPNVPFLWAWNAPSEFCLGKFDEPLDMSLFSFIGSPRINATGQGVTIFYVDRLGYYPYIDSITGVTVNGGIPQKISLQDHLDKAKKDITFYMPVDNLGMAVIDWEEWRPTWARNWKPKDVYKNRSIELVQQQNVQLSLTEATEKAKQEFEKAGKDFLVETIKLGKLLRPNHLWGYYLFPDCYNHHYKKPGYNGSCFNVEIKRNDDLSWLWNESTALYPSIYLNTQQSPVAATLYVRNRVREAIRVSKIPDAKSPLPVFAYTRIVFTDQVLKFLSQDELVYTFGETVALGASGIVIWGSWENTRHKESCQAIKEYMDTTLNPYIINVTLAAKMCSQVLCQEQGVCIRKNWNSSDYLHLNPDNFAIQLEKGGKFTVRGKPTLEDLEQFSEKFYCSCYSTLSCKEKADVKDTDAVDVCIADGVCIDAF

SEQ ID NO: 168 - protein, 431 aa, artificial Sequence
  Hyaluronidase Variant
FRAPPVIPNVPFLWAWNAPSEFCLGKFDEPLDMSLFSFIGSPRINATGQGVTIFYVDRLGYYPYIDSITGVTVNGGIPQKISLQDHLDKAKKDITFYMPVDNLGMAVIDWEEWRPTWARNWKPKDVYKNRSIELVQQQNVQLSLTEATEKAKQEFEKAGKDFLVETIKLGKLLRPNHLWGYYLFPDCYNHHYKKPGYNGSCFNVEIKRNDDLSWLWNESTALYPSIYLNTQQSPVAATLYVRNRVREAIRVSKIPDAKSPLPVFAYTRIVFTDQVLKFLSQDELVYTFGETVALGASGIVIWGSWENTRTFESCQAIKEYMDTTLNPYIINVTLAAKMCSQVLCQEQGVCIRKNWNSSDYLHLNPDNFAIQLEKGGKFTVRGKPTLEDLEQFSEKFYCSCYSTLSCKEKADVKDTDAVDVCIADGVCIDAF

SEQ ID NO: 169 - protein, 431 aa, artificial Sequence
  Hyaluronidase Variant
FRAPPVIPNVPFLWAWNAPSEFCLGKFDEPLDMSLFSFIGSPRINATGQGVTIFYVDRLGYYPYIDSITGVTVNGGIPQKISLQDHLDKAKKDITFYMPVDNLGMAVIDWEEWRPTWARNWKPKDVYKNRSIELVQQQNVQLSLTEATEKAKQEFEKAGKDFLVETIKLGKLLRPNHLWGYYLFPDCYNHHYKKPGYNGSCFNVEIKRNDDLSWLWNESTALYPSIYLNTQQSPVAATLYVRNRVREAIRVSKIPDAKSPLPVFAYTRIVFTDQVLKFLSQDELVYTFGETVALGASGIVIWGSWENTRTKEDCQAIKEYMDTTLNPYIINVTLAAKMCSQVLCQEQGVCIRKNWNSSDYLHLNPDNFAIQLEKGGKFTVRGKPTLEDLEQFSEKFYCSCYSTLSCKEKADVKDTDAVDVCIADGVCIDAF

SEQ ID NO: 170 - protein, 431 aa, artificial Sequence
  Hyaluronidase Variant
FRAPPVIPNVPFLWAWNAPSEFCLGKFDEPLDMSLFSFIGSPRINATGQGVTIFYVDRLGYYPYIDSITGVTVNGGIPQKISLQDHLDKAKKDITFYMPVDNLGMAVIDWEEWRPTWARNWKPKDVYKNRSIELVQQQNVQLSLTEATEKAKQEFEKAGKDFLVETIKLGKLLRPNHLWGYYLFPDCYNHHYKKPGYNGSCFNVEIKRNDDLSWLWNESTALYPSIYLNTQQSPVAATLYVRNRVREAIRVSKIPDAKSPLPVFAYTRIVFTDQVLKFLSQDELVYTFGETVALGASGIVIWGSWENTRTKESCYAIKEYMDTTLNPYIINVTLAAKMCSQVLCQEQGVCIRKNWNSSDYLHLNPDNFAIQLEKGGKFTVRGKPTLEDLEQFSEKFYCSCYSTLSCKEKADVKDTDAVDVCIADGVCIDAF

SEQ ID NO: 171 - protein, 431 aa, artificial Sequence
  Hyaluronidase Variant
FRAPPVIPNVPFLWAWNAPSEFCLGKFDEPLDMSLFSFIGSPRINATGQGVTIFYVDRLGYYPYIDSITGVTVNGGIPQKISLQDHLDKAKKDITFYMPVDNLGMAVIDWEEWRPTWARNWKPKDVYKNRSIELVQQQNVQLSLTEATEKAKQEFEKAGKDFLVETIKLGKLLRPNHLWGYYLFPDCYNHHYKKPGYNGSCFNVEIKRNDDLSWLWNESTALYPSIYLNTQQSPVAATLYVRNRVREAIRVSKIPDAKSPLPVFAYTRIVFTDQVLKFLSQDELVYTFGETVALGASGIVIWGSWENTRTKESCQEIKEYMDTTLNPYIINVTLAAKMCSQVLCQEQGVCIRKNWNSSDYLHLNPDNFAIQLEKGGKFTVRGKPTLEDLEQFSEKFYCSCYSTLSCKEKADVKDTDAVDVCIADGVCIDAF

SEQ ID NO: 172 - protein, 431 aa, artificial Sequence
  Hyaluronidase Variant
FRAPPVIPNVPFLWAWNAPSEFCLGKFDEPLDMSLFSFIGSPRINATGQGVTIFYVDRLGYYPYIDSITGVTVNGGIPQKISLQDHLDKAKKDITFYMPVDNLGMAVIDWEEWRPTWARNWKPKDVYKNRSIELVQQQNVQLSLTEATEKAKQEFEKAGKDFLVETIKLGKLLRPNHLWGYYLFPDCYNHHYKKPGYNGSCFNVEIKRNDDLSWLWNESTALYPSIYLNTQQSPVAATLYVRNRVREAIRVSKIPDAKSPLPVFAYTRIVFTDQVLKFLSQDELVYTFGETVALGASGIVIWGSWENTRTKESCQAIKEYYDTTLNPYIINVTLAAKMCSQVLCQEQGVCIRKNWNSSDYLHLNPDNFAIQLEKGGKFTVRGKPTLEDLEQFSEKFYCSCYSTLSCKEKADVKDTDAVDVCIADGVCIDAF

SEQ ID NO: 173 - protein, 431 aa, artificial Sequence
  Hyaluronidase Variant
FRAPPVIPNVPFLWAWNAPSEFCLGKFDEPLDMSLFSFIGSPRINATGQGVTIFYVDRLGYYPYIDSITGVTVNGGIPQKISLQDHLDKAKKDITFYMPVDNLGMAVIDWEEWRPTWARNWKPKDVYKNRSIELVQQQNVQLSLTEATEKAKQEFEKAGKDFLVETIKLGKLLRPNHLWGYYLFPDCYNHHYKKPGYNGSCFNVEIKRNDDLSWLWNESTALYPSIYLNTQQSPVAATLYVRNRVREAIRVSKIPDAKSPLPVFAYTRIVFTDQVLKFLSQDELVYTFGETVALGASGIVIWGSWENTRTKESCQAIKEYMQTTLNPYIINVTLAAKMCSQVLCQEQGVCIRKNWNSSDYLHLNPDNFAIQLEKGGKFTVRGKPTLEDLEQFSEKFYCSCYSTLSCKEKADVKDTDAVDVCIADGVCIDAF

SEQ ID NO: 174 - protein, 431 aa, artificial Sequence
  Hyaluronidase Variant
FRAPPVIPNVPFLWAWNAPSEFCLGKFDEPLDMSLFSFIGSPRINATGQGVTIFYVDRLGYYPYIDSITGVTVNGGIPQKISLQDHLDKAKKDITFYMPVDNLGMAVIDWEEWRPTWARNWKPKDVYKNRSIELVQQQNVQLSLTEATEKAKQEFEKAGKDFLVETIKLGKLLRPNHLWGYYLFPDCYNHHYKKPGYNGSCFNVEIKRNDDLSWLWNESTALYPSIYLNTQQSPVAATLYVRNRVREAIRVSKIPDAKSPLPVFAYTRIVFTDQVLKFLSQDELVYTFGETVALGASGIVIWGSWENTRTKESCQAIKEYMDLTLNPYIINVTLAAKMCSQVLCQEQGVCIRKNWNSSDYLHLNPDNFAIQLEKGGKFTVRGKPTLEDLEQFSEKFYCSCYSTLSCKEKADVKDTDAVDVCIADGVCIDAF

SEQ ID NO: 175 - protein, 431 aa, artificial Sequence
  Hyaluronidase Variant
FRAPPVIPNVPFLWAWNAPSEFCLGKFDEPLDMSLFSFIGSPRINATGQGVTIFYVDRLGYYPYIDSITGVTVNGGIPQKISLQDHLDKAKKDITFYMPVDNLGMAVIDWEEWRPTWARNWKPKDVYKNRSIELVQQQNVQLSLTEATEKAKQEFEKAGKDFLVETIKLGKLLRPNHLWGYYLFPDCYNHHYKKPGYNGSCFNVEIKRNDDLSWLWNESTALYPSIYLNTQQSPVAATLYVRNRVREAIRVSKIPDAKSPLPVFAYTRIVFTDQVLKFLSQDELVYTFGETVALGASGIVIWGSWENTRTKESCQAIKEYMDTELNPYIINVTLAAKMCSQVLCQEQGVCIRKNWNSSDYLHLNPDNFAIQLEKGGKFTVRGKPTLEDLEQFSEKFYCSCYSTLSCKEKADVKDTDAVDVCIADGVCIDAF

SEQ ID NO: 176 - protein, 431 aa, artificial Sequence
  Hyaluronidase Variant
FRAPPVIPNVPFLWAWNAPSEFCLGKFDEPLDMSLFSFIGSPRINATGQGVTIFYVDRLGYYPYIDSITGVTVNGGIPQKISLQDHLDKAKKDITFYMPVDNLGMAVIDWEEWRPTWARNWKPKDVYKNRSIELVQQQNVQLSLTEATEKAKQEFEKAGKDFLVETIKLGKLLRPNHLWGYYLFPDCYNHHYKKPGYNGSCFNVEIKRNDDLSWLWNESTALYPSIYLNTQQSPVAATLYVRNRVREAIRVSKIPDAKSPLPVFAYTRIVFTDQVLKFLSQDELVYTFGETVALGASGIVIWGSWENTRTKESCQAIKEYMDTTLEPYIINVTLAAKMCSQVLCQEQGVCIRKNWNSSDYLHLNPDNFAIQLEKGGKFTVRGKPTLEDLEQFSEKFYCSCYSTLSCKEKADVKDTDAVDVCIADGVCIDAF

SEQ ID NO: 177 - protein, 431 aa, artificial Sequence
  Hyaluronidase Variant
FRAPPVIPNVPFLWAWNAPSEFCLGKFDEPLDMSLFSFIGSPRINATGQGVTIFYVDRLGYYPYIDSITGVTVNGGIPQKISLQDHLDKAKKDITFYMPVDNLGMAVIDWEEWRPTWARNWKPKDVYKNRSIELVQQQNVQLSLTEATEKAKQEFEKAGKDFLVETIKLGKLLRPNHLWGYYLFPDCYNHHYKKPGYNGSCFNVEIKRNDDLSWLWNESTALYPSIYLNTQQSPVAATLYVRNRVREAIRVSKIPDAKSPLPVFAYTRIVFTDQVLKFLSQDELVYTFGETVALGASGIVIWGSHENTRTKESCQAIKEYMDTTLNPYIINVTLAAKMCSQVLCQEQGVCIRKNWNSSDYLHLNPDNFAIQLEKGGKFTVRGKPTLEDLEQFSEKFYCSCYSTLSCKEKADVKDTDAVDVCIADGVCIDAF

SEQ ID NO: 178 - protein, 431 aa, artificial Sequence
  Hyaluronidase Variant
FRAPPVIPNVPFLWAWNAPSEFCLGKFDEPLDMSLFSFIGSPRINATGQGVTIFYVDRLGYYPYIDSITGVTVNGGIPQKISLQDHLDKAKKDITFYMPVDNLGMAVIDWEEWRPTWARNWKPKDVYKNRSIELVQQQNVQLSLTEATEKAKQEFEKAGKDFLVETIKLGKLLRPNHLWGYYLFPDCYNHHYKKPGYNGSCFNVEIKRNDDLSWLWNESTALYPSIYLNTQQSPVAATLYVRNRVREAIRVSKIPDAKSPLPVFAYTRIVFTDQVLKFLSQDELVYTFGETVALGASGIVIWGSWENTRTDESCQAIKEYMDTTLNPYIINVTLAAKMCSQVLCQEQGVCIRKNWNSSDYLHLNPDNFAIQLEKGGKFTVRGKPTLEDLEQFSEKFYCSCYSTLSCKEKADVKDTDAVDVCIADGVCIDAF

SEQ ID NO: 179 - protein, 431 aa, artificial Sequence
  Hyaluronidase Variant
FRAPPVIPNVPFLWAWNAPSEFCLGKFDEPLDMSLFSFIGSPRINATGQGVTIFYVDRLGYYPYIDSITGVTVNGGIPQKISLQDHLDKAKKDITFYMPVDNLGMAVIDWEEWRPTWARNWKPKDVYKNRSIELVQQQNVQLSLTEATEKAKQEFEKAGKDFLVETIKLGKLLRPNHLWGYYLFPDCYNHHYKKPGYNGSCFNVEIKRNDDLSWLWNESTALYPSIYLNTQQSPVAATLYVRNRVREAIRVSKIPDAKSPLPVFAYTRIVFTDQVLKFLSQDELVYTFGETVALGASGIVIWGSWENTRTKESCQAIKEYMDTHLNPYIINVTLAAKMCSQVLCQEQGVCIRKNWNSSDYLHLNPDNFAIQLEKGGKFTVRGKPTLEDLEQFSEKFYCSCYSTLSCKEKADVKDTDAVDVCIADGVCIDAF

SEQ ID NO: 180 - protein, 430 aa, artificial Sequence
  Hyaluronidase Variant
RAPPVIPNVPFLWAWNAPSEFCLGKFDEPLDMSLFSFIGSPRINATGQGVTIFYVDRLGYYPYIDSITGVTVNGGIPQKISLQDHLDKAKKDITFYMPVDNLGMAVIDWEEWRPTWARNWKPKDVYKNRSIELVQQQNVQLSLTEATEKAKQEFEKAGKDFLVETIKLGKLLRPNHLWGYYLFPDCYNHHYKKPGYNGSCFNVEIKRNDDLSWLWNESTALYPSIYLNTQQSPVAATLYVRNRVREAIRVSKIPDAKSPLPVFAYTRIVFTDQVLKFLSQDELVYTFGETVALGASGIVIWGSWENTRTKESCQAIKEYMDTTLNPYIINVTLAAKMCSQVLCQEQGVCIRKNWNSSDYLHLNPDNFAIQLEKGGKFTVRGKPTLEDLEQFSEKFYCSCYSTLSCKEKADVKDTDAVDVCIADGVCIDAF

SEQ ID NO: 181 - protein, 429 aa, artificial Sequence
  Hyaluronidase Variant
APPVIPNVPFLWAWNAPSEFCLGKFDEPLDMSLFSFIGSPRINATGQGVTIFYVDRLGYYPYIDSITGVTVNGGIPQKISLQDHLDKAKKDITFYMPVDNLGMAVIDWEEWRPTWARNWKPKDVYKNRSIELVQQQNVQLSLTEATEKAKQEFEKAGKDFLVETIKLGKLLRPNHLWGYYLFPDCYNHHYKKPGYNGSCFNVEIKRNDDLSWLWNESTALYPSIYLNTQQSPVAATLYVRNRVREAIRVSKIPDAKSPLPVFAYTRIVFTDQVLKFLSQDELVYTFGETVALGASGIVIWGSWENTRTKESCQAIKEYMDTTLNPYIINVTLAAKMCSQVLCQEQGVCIRKNWNSSDYLHLNPDNFAIQLEKGGKFTVRGKPTLEDLEQFSEKFYCSCYSTLSCKEKADVKDTDAVDVCIADGVCIDAF

SEQ ID NO: 182 - protein, 419 aa, artificial Sequence
  Hyaluronidase Variant
FRAPPVIPNVPFLWAWNAPSEFCLGKFDEPLDMSLFSFIGSPRINATGQGVTIFYVDRLGYYPYIDSITGVTVNGGIPQKISLQDHLDKAKKDITFYMPVDNLGMAVIDWEEWRPTWARNWKPKDVYKNRSIELVQQQNVQLSLTEATEKAKQEFEKAGKDFLVETIKLGKLLRPNHLWGYYLFPDCYNHHYKKPGYNGSCFNVEIKRNDDLSWLWNESTALYPSIYLNTQQSPVAATLYVRNRVREAIRVSKIPDAKSPLPVFAYTRIVFTDQVLKFLSQDELVYTFGETVALGASGIVIWGSWENTRTKESCQAIKEYMDTTLNPYIINVTLAAKMCSQVLCQEQGVCIRKNWNSSDYLHLNPDNFAIQLEKGGKFTVRGKPTLEDLEQFSEKFYCSCYSTLSCKEKADVKDTDAVD

SEQ ID NO: 183 - protein, 430 aa, artificial Sequence
  Hyaluronidase Variant
RAPPVIPNVPFLWAWNAPSEFCLGKFDEPLDMSLFSFIGSPRINATGQGVTIFYVDRLGYYPYIDSITGVTVNGGIPQKISLQDHLDKAKKDITFYMPVDNLGMAVIDWEEWRPTWARNWKPKDVYKNRSIELVQQQNVQLSLTEATEKAKQEFEKAGKDFLVETIKLGKLLRPNHLWGYYLFPDCYNHHYKKPGYNGSCFNVEIKRNDDLSWLWNESTALYPSIYLNTQQSPVAATLYVRNRVREAIRVSKIPDAKSPLPVFAYTRIVFTDQVLKFLSQDELVYTFGETVALGASGIVIWGSWENTRTKEQCQAIKEYMDRTLNPYIINVTLAAKMCSQVLCQEQGVCIRKNWNSSDYLHLNPDNFAIQLEKGGKFTVRGKPTLEDLEQFSEKFYCSCYSTLSCKEKADVKDTDAVDVCIADGVCIDAF

SEQ ID NO: 184 - protein, 431 aa, artificial Sequence
  Hyaluronidase Variant
FRAPPVIPNVPFLWAWNAPSEFCLGKFAEPLDMSLFSFIGSPRINATGQGVTIFYVDRLGYYPYIDSITGVTVNGGIPQKISLQDHLDKAKKDITFYMPVDNLGMAVIDWEEWRPTWARNWKPKDVYKNRSIELVQQQNVQLSLTEATEKAKQEFEKAGKDFLVETIKLGKLLRPNHLWGYYLFPDCYNHHYKKPGYNGSCFNVEIKRNDDLSWLWNESTALYPSIYLNTQQSPVAATLYVRNRVREAIRVSKIPDAKSPLPVFAYTRIVFTDQVLKFLSQDELVYTFGETVALGASGIVIWGSWENTRTKESCQAIKEYMDTTLNPYIINVTLAAKMCSQVLCQEQGVCIRKNWNSSDYLHLNPDNFAIQLEKGGKFTVRGKPTLEDLEQFSEKFYCSCYSTLSCKEKADVKDTDAVDVCIADGVCIDAF

SEQ ID NO: 185 - protein, 431 aa, artificial Sequence
  Hyaluronidase Variant
FRAPPVIPNVPFLWAWNAPSEFCLGKFDAPLDMSLFSFIGSPRINATGQGVTIFYVDRLGYYPYIDSITGVTVNGGIPQKISLQDHLDKAKKDITFYMPVDNLGMAVIDWEEWRPTWARNWKPKDVYKNRSIELVQQQNVQLSLTEATEKAKQEFEKAGKDFLVETIKLGKLLRPNHLWGYYLFPDCYNHHYKKPGYNGSCFNVEIKRNDDLSWLWNESTALYPSIYLNTQQSPVAATLYVRNRVREAIRVSKIPDAKSPLPVFAYTRIVFTDQVLKFLSQDELVYTFGETVALGASGIVIWGSWENTRTKESCQAIKEYMDTTLNPYIINVTLAAKMCSQVLCQEQGVCIRKNWNSSDYLHLNPDNFAIQLEKGGKFTVRGKPTLEDLEQFSEKFYCSCYSTLSCKEKADVKDTDAVDVCIADGVCIDAF

SEQ ID NO: 186 - protein, 431 aa, artificial Sequence
  Hyaluronidase Variant
FRAPPVIPNVPFLWAWNAPSEFCLGKFDEALDMSLFSFIGSPRINATGQGVTIFYVDRLGYYPYIDSITGVTVNGGIPQKISLQDHLDKAKKDITFYMPVDNLGMAVIDWEEWRPTWARNWKPKDVYKNRSIELVQQQNVQLSLTEATEKAKQEFEKAGKDFLVETIKLGKLLRPNHLWGYYLFPDCYNHHYKKPGYNGSCFNVEIKRNDDLSWLWNESTALYPSIYLNTQQSPVAATLYVRNRVREAIRVSKIPDAKSPLPVFAYTRIVFTDQVLKFLSQDELVYTFGETVALGASGIVIWGSWENTRTKESCQAIKEYMDTTLNPYIINVTLAAKMCSQVLCQEQGVCIRKNWNSSDYLHLNPDNFAIQLEKGGKFTVRGKPTLEDLEQFSEKFYCSCYSTLSCKEKADVKDTDAVDVCIADGVCIDAF

SEQ ID NO: 187 - protein, 431 aa, artificial Sequence
  Hyaluronidase Variant
FRAPPVIPNVPFLWAWNAPSEFCLGKFDEPADMSLFSFIGSPRINATGQGVTIFYVDRLGYYPYIDSITGVTVNGGIPQKISLQDHLDKAKKDITFYMPVDNLGMAVIDWEEWRPTWARNWKPKDVYKNRSIELVQQQNVQLSLTEATEKAKQEFEKAGKDFLVETIKLGKLLRPNHLWGYYLFPDCYNHHYKKPGYNGSCFNVEIKRNDDLSWLWNESTALYPSIYLNTQQSPVAATLYVRNRVREAIRVSKIPDAKSPLPVFAYTRIVFTDQVLKFLSQDELVYTFGETVALGASGIVIWGSWENTRTKESCQAIKEYMDTTLNPYIINVTLAAKMCSQVLCQEQGVCIRKNWNSSDYLHLNPDNFAIQLEKGGKFTVRGKPTLEDLEQFSEKFYCSCYSTLSCKEKADVKDTDAVDVCIADGVCIDAF

SEQ ID NO: 188 - protein, 431 aa, artificial Sequence
  Hyaluronidase Variant
FRAPPVIPNVPFLWAWNAPSEFCLGKFDEPLDMSLFSFIGSPRINATGQGVTIFYVDRLGYYPYIDSITGVTVNGGIPQKISLQDHLDKAKKDITFYMPVDNLGMAVIDWEEWRPTWARNWKPKDVYKNRSIELVQQQNVQLSLTEATEKAKQEFEKAGKDFLVETIKLGKLLRPNHLWGYYLFPDCYNHHYKKPGYNGSCFNVEIKRNDDLSWLWNESTALYPSIYLNTQQSPVAATLYVRNRVREAIRVSKIPDAKSPLPVFAYTRIVFTDAVLKFLSQDELVYTFGETVALGASGIVIWGSWENTRTKESCQAIKEYMDTTLNPYIINVTLAAKMCSQVLCQEQGVCIRKNWNSSDYLHLNPDNFAIQLEKGGKFTVRGKPTLEDLEQFSEKFYCSCYSTLSCKEKADVKDTDAVDVCIADGVCIDAF

SEQ ID NO: 189 - protein, 431 aa, artificial Sequence
  Hyaluronidase Variant
FRAPPVIPNVPFLWAWNAPSEFCLGKFDEPLDMSLFSFIGSPRINATGQGVTIFYVDRLGYYPYIDSITGVTVNGGIPQKISLQDHLDKAKKDITFYMPVDNLGMAVIDWEEWRPTWARNWKPKDVYKNRSIELVQQQNVQLSLTEATEKAKQEFEKAGKDFLVETIKLGKLLRPNHLWGYYLFPDCYNHHYKKPGYNGSCFNVEIKRNDDLSWLWNESTALYPSIYLNTQQSPVAATLYVRNRVREAIRVSKIPDAKSPLPVFAYTRIVFTDQALKFLSQDELVYTFGETVALGASGIVIWGSWENTRTKESCQAIKEYMDTTLNPYIINVTLAAKMCSQVLCQEQGVCIRKNWNSSDYLHLNPDNFAIQLEKGGKFTVRGKPTLEDLEQFSEKFYCSCYSTLSCKEKADVKDTDAVDVCIADGVCIDAF

SEQ ID NO: 190 - protein, 431 aa, artificial Sequence
  Hyaluronidase Variant
FRAPPVIPNVPFLWAWNAPSEFCLGKFDEPLDMSLFSFIGSPRINATGQGVTIFYVDRLGYYPYIDSITGVTVNGGIPQKISLQDHLDKAKKDITFYMPVDNLGMAVIDWEEWRPTWARNWKPKDVYKNRSIELVQQQNVQLSLTEATEKAKQEFEKAGKDFLVETIKLGKLLRPNHLWGYYLFPDCYNHHYKKPGYNGSCFNVEIKRNDDLSWLWNESTALYPSIYLNTQQSPVAATLYVRNRVREAIRVSKIPDAKSPLPVFAYTRIVFTDQVAKFLSQDELVYTFGETVALGASGIVIWGSWENTRTKESCQAIKEYMDTTLNPYIINVTLAAKMCSQVLCQEQGVCIRKNWNSSDYLHLNPDNFAIQLEKGGKFTVRGKPTLEDLEQFSEKFYCSCYSTLSCKEKADVKDTDAVDVCIADGVCIDAF

SEQ ID NO: 191 - protein, 431 aa, artificial Sequence
  Hyaluronidase Variant
FRAPPVIPNVPFLWAWNAPSEFCLGKFDEPLDMSLFSFIGSPRINATGQGVTIFYVDRLGYYPYIDSITGVTVNGGIPQKISLQDHLDKAKKDITFYMPVDNLGMAVIDWEEWRPTWARNWKPKDVYKNRSIELVQQQNVQLSLTEATEKAKQEFEKAGKDFLVETIKLGKLLRPNHLWGYYLFPDCYNHHYKKPGYNGSCFNVEIKRNDDLSWLWNESTALYPSIYLNTQQSPVAATLYVRNRVREAIRVSKIPDAKSPLPVFAYTRIVFTDQVLAFLSQDELVYTFGETVALGASGIVIWGSWENTRTKESCQAIKEYMDTTLNPYIINVTLAAKMCSQVLCQEQGVCIRKNWNSSDYLHLNPDNFAIQLEKGGKFTVRGKPTLEDLEQFSEKFYCSCYSTLSCKEKADVKDTDAVDVCIADGVCIDAF

SEQ ID NO: 192 - protein, 431 aa, artificial Sequence
  Hyaluronidase Variant
FRAPPVIPNVPFLWAWNAPSEFCLGKFDEPLDMSLFSFIGSPRINATGQGVTIFYVDRLGYYPYIDSITGVTVNGGIPQKISLQDHLDKAKKDITFYMPVDNLGMAVIDWEEWRPTWARNWKPKDVYKNRSIELVQQQNVQLSLTEATEKAKQEFEKAGKDFLVETIKLGKLLRPNHLWGYYLFPDCYNHHYKKPGYNGSCFNVEIKRNDDLSWLWNESTALYPSIYLATQQSPVAATLYVRNRVREAIRVSKIPDAKSPLPVFAYTRIVFTDQVLKFLSQDELVYTFGETVALGASGIVIWGSWENTRTKESCQAIKEYMDTTLNPYIINVTLAAKMCSQVLCQEQGVCIRKNWNSSDYLHLNPDNFAIQLEKGGKFTVRGKPTLEDLEQFSEKFYCSCYSTLSCKEKADVKDTDAVDVCIADGVCIDAF

SEQ ID NO: 193 - protein, 431 aa, artificial Sequence
  Hyaluronidase Variant
FRAPPVIPNVPFLWAWNAPSEFCLGKFDEPLDMSLFSFIGSPRINATGQGVTIFYVDRLGYYPYIDSITGVTVNGGIPQKISLQDHLDKAKKDITFYMPVDNLGMAVIDWEEWRPTWARNWKPKDVYKNRSIELVQQQNVQLSLTEATEKAKQEFEKAGKDFLVETIKLGKLLRPNHLWGYYLFPDCYNHHYKKPGYNGSCFNVEIKRNDDLSWLWNESTALYPSIYLNAQQSPVAATLYVRNRVREAIRVSKIPDAKSPLPVFAYTRIVFTDQVLKFLSQDELVYTFGETVALGASGIVIWGSWENTRTKESCQAIKEYMDTTLNPYIINVTLAAKMCSQVLCQEQGVCIRKNWNSSDYLHLNPDNFAIQLEKGGKFTVRGKPTLEDLEQFSEKFYCSCYSTLSCKEKADVKDTDAVDVCIADGVCIDAF

SEQ ID NO: 194 - protein, 431 aa, artificial Sequence
  Hyaluronidase Variant
FRAPPVIPNVPFLWAWNAPSEFCLGKFDEPLDMSLFSFIGSPRINATGQGVTIFYVDRLGYYPYIDSITGVTVNGGIPQKISLQDHLDKAKKDITFYMPVDNLGMAVIDWEEWRPTWARNWKPKDVYKNRSIELVQQQNVQLSLTEATEKAKQEFEKAGKDFLVETIKLGKLLRPNHLWGYYLFPDCYNHHYKKPGYNGSCFNVEIKRNDDLSWLWNESTALYPSIYLNTAQSPVAATLYVRNRVREAIRVSKIPDAKSPLPVFAYTRIVFTDQVLKFLSQDELVYTFGETVALGASGIVIWGSWENTRTKESCQAIKEYMDTTLNPYIINVTLAAKMCSQVLCQEQGVCIRKNWNSSDYLHLNPDNFAIQLEKGGKFTVRGKPTLEDLEQFSEKFYCSCYSTLSCKEKADVKDTDAVDVCIADGVCIDAF

SEQ ID NO: 195 - protein, 431 aa, artificial Sequence
  Hyaluronidase Variant
FRAPPVIPNVPFLWAWNAPSEFCLGKFDEPLDMSLFSFIGSPRINATGQGVTIFYVDRLGYYPYIDSITGVTVNGGIPQKISLQDHLDKAKKDITFYMPVDNLGMAVIDWEEWRPTWARNWKPKDVYKNRSIELVQQQNVQLSLTEATEKAKQEFEKAGKDFLVETIKLGKLLRPNHLWGYYLFPDCYNHHYKKPGYNGSCFNVEIKRNDDLSWLWNESTALYPSIYLNTQASPVAATLYVRNRVREAIRVSKIPDAKSPLPVFAYTRIVFTDQVLKFLSQDELVYTFGETVALGASGIVIWGSWENTRTKESCQAIKEYMDTTLNPYIINVTLAAKMCSQVLCQEQGVCIRKNWNSSDYLHLNPDNFAIQLEKGGKFTVRGKPTLEDLEQFSEKFYCSCYSTLSCKEKADVKDTDAVDVCIADGVCIDAF

SEQ ID NO: 196 - protein, 431 aa, artificial Sequence
  Hyaluronidase Variant
FRAPPVIPNVPFLWAWNAPSEFCLGKFDEPLDMSLFSFIGSPRINATGQGVTIFYVDRLGYYPYIDSITGVTVNGGIPQKISLQDHLDKAKKDITFYMPVDNLGMAVIDWEEWRPTWARNWKPKDVYKNRSIELVQQQNVQLSLTEATEKAKQEFEKAGKDFLVETIKLGKLLRPNHLWGYYLFPDCYNHHYKKPGYNGSCFNVEIKRNDDLSWLWNESTALYPSIYLNTQQSAVAATLYVRNRVREAIRVSKIPDAKSPLPVFAYTRIVFTDQVLKFLSQDELVYTFGETVALGASGIVIWGSWENTRTKESCQAIKEYMDTTLNPYIINVTLAAKMCSQVLCQEQGVCIRKNWNSSDYLHLNPDNFAIQLEKGGKFTVRGKPTLEDLEQFSEKFYCSCYSTLSCKEKADVKDTDAVDVCIADGVCIDAF

SEQ ID NO: 197 - protein, 431 aa, artificial Sequence
  Hyaluronidase Variant
FRAPPVIPNVPFLWAWNAPSEFCLGKFDEPLDMSLFSFIGSPRINATGQGVTIFYVDRLGYYPYIDSITGVTVNGGIPQKISLQDHLDKAKKDITFYMPVDNLGMAVIDWEEWRPTWARNWKPKDVYKNRSIELVQQQNVQLSLTEATEKAKQEFEKAGKDFLVETIKLGKLLRPNHLWGYYLFPDCYNHHYKKPGYNGSCFNVEIKRNDDLSWLWNESTALYPSIYLNTQQSPAAATLYVRNRVREAIRVSKIPDAKSPLPVFAYTRIVFTDQVLKFLSQDELVYTFGETVALGASGIVIWGSWENTRTKESCQAIKEYMDTTLNPYIINVTLAAKMCSQVLCQEQGVCIRKNWNSSDYLHLNPDNFAIQLEKGGKFTVRGKPTLEDLEQFSEKFYCSCYSTLSCKEKADVKDTDAVDVCIADGVCIDAF

SEQ ID NO: 198 - protein, 431 aa, artificial Sequence
  Hyaluronidase Variant
FRAPPVIPNVPFLWAWNAPSEFCLGKFDEPLDMSLFSFIGSPRINATGQGVTIFYVDRLGYYPYADSITGVTVNGGIPQKISLQDHLDKAKKDITFYMPVDNLGMAVIDWEEWRPTWARNWKPKDVYKNRSIELVQQQNVQLSLTEATEKAKQEFEKAGKDFLVETIKLGKLLRPNHLWGYYLFPDCYNHHYKKPGYNGSCFNVEIKRNDDLSWLWNESTALYPSIYLNTQQSPVAATLYVRNRVREAIRVSKIPDAKSPLPVFAYTRIVFTDQVLKFLSQDELVYTFGETVALGASGIVIWGSWENTRTKESCQAIKEYMDTTLNPYIINVTLAAKMCSQVLCQEQGVCIRKNWNSSDYLHLNPDNFAIQLEKGGKFTVRGKPTLEDLEQFSEKFYCSCYSTLSCKEKADVKDTDAVDVCIADGVCIDAF

SEQ ID NO: 199 - protein, 431 aa, artificial Sequence
  Hyaluronidase Variant
FRAPPVIPNVPFLWAWNAPSEFCLGKFDEPLDMSLFSFIGSPRINATGQGVTIFYVDRLGYYPYIASITGVTVNGGIPQKISLQDHLDKAKKDITFYMPVDNLGMAVIDWEEWRPTWARNWKPKDVYKNRSIELVQQQNVQLSLTEATEKAKQEFEKAGKDFLVETIKLGKLLRPNHLWGYYLFPDCYNHHYKKPGYNGSCFNVEIKRNDDLSWLWNESTALYPSIYLNTQQSPVAATLYVRNRVREAIRVSKIPDAKSPLPVFAYTRIVFTDQVLKFLSQDELVYTFGETVALGASGIVIWGSWENTRTKESCQAIKEYMDTTLNPYIINVTLAAKMCSQVLCQEQGVCIRKNWNSSDYLHLNPDNFAIQLEKGGKFTVRGKPTLEDLEQFSEKFYCSCYSTLSCKEKADVKDTDAVDVCIADGVCIDAF

SEQ ID NO: 200 - protein, 431 aa, artificial Sequence
  Hyaluronidase Variant
FRAPPVIPNVPFLWAWNAPSEFCLGKFDEPLDMSLFSFIGSPRINATGQGVTIFYVDRLGYYPYIDAITGVTVNGGIPQKISLQDHLDKAKKDITFYMPVDNLGMAVIDWEEWRPTWARNWKPKDVYKNRSIELVQQQNVQLSLTEATEKAKQEFEKAGKDFLVETIKLGKLLRPNHLWGYYLFPDCYNHHYKKPGYNGSCFNVEIKRNDDLSWLWNESTALYPSIYLNTQQSPVAATLYVRNRVREAIRVSKIPDAKSPLPVFAYTRIVFTDQVLKFLSQDELVYTFGETVALGASGIVIWGSWENTRTKESCQAIKEYMDTTLNPYIINVTLAAKMCSQVLCQEQGVCIRKNWNSSDYLHLNPDNFAIQLEKGGKFTVRGKPTLEDLEQFSEKFYCSCYSTLSCKEKADVKDTDAVDVCIADGVCIDAF

SEQ ID NO: 201 - protein, 431 aa, artificial Sequence
  Hyaluronidase Variant
FRAPPVIPNVPFLWAWNAPSEFCLGKFDEPLDMSLFSFIGSPRINATGQGVTIFYVDRLGYYPYIDSATGVTVNGGIPQKISLQDHLDKAKKDITFYMPVDNLGMAVIDWEEWRPTWARNWKPKDVYKNRSIELVQQQNVQLSLTEATEKAKQEFEKAGKDFLVETIKLGKLLRPNHLWGYYLFPDCYNHHYKKPGYNGSCFNVEIKRNDDLSWLWNESTALYPSIYLNTQQSPVAATLYVRNRVREAIRVSKIPDAKSPLPVFAYTRIVFTDQVLKFLSQDELVYTFGETVALGASGIVIWGSWENTRTKESCQAIKEYMDTTLNPYIINVTLAAKMCSQVLCQEQGVCIRKNWNSSDYLHLNPDNFAIQLEKGGKFTVRGKPTLEDLEQFSEKFYCSCYSTLSCKEKADVKDTDAVDVCIADGVCIDAF

SEQ ID NO: 202 - protein, 431 aa, artificial Sequence
  Hyaluronidase Variant
FRAPPVIPNVPFLWAWNAPSEFCLGKFDEPLDMSLFSFIGSPRINATGQGVTIFYVDRLGYYPYIDSITGVTVNGGIPQKISLQDHLDKAKKDIAFYMPVDNLGMAVIDWEEWRPTWARNWKPKDVYKNRSIELVQQQNVQLSLTEATEKAKQEFEKAGKDFLVETIKLGKLLRPNHLWGYYLFPDCYNHHYKKPGYNGSCFNVEIKRNDDLSWLWNESTALYPSIYLNTQQSPVAATLYVRNRVREAIRVSKIPDAKSPLPVFAYTRIVFTDQVLKFLSQDELVYTFGETVALGASGIVIWGSWENTRTKESCQAIKEYMDTTLNPYIINVTLAAKMCSQVLCQEQGVCIRKNWNSSDYLHLNPDNFAIQLEKGGKFTVRGKPTLEDLEQFSEKFYCSCYSTLSCKEKADVKDTDAVDVCIADGVCIDAF

SEQ ID NO: 203 - protein, 431 aa, artificial Sequence
  Hyaluronidase Variant
FRAPPVIPNVPFLWAWNAPSEFCLGKFDEPLDMSLFSFIGSPRINATGQGVTIFYVDRLGYYPYIDSITGVTVNGGIPQKISLQDHLDKAKKDITAYMPVDNLGMAVIDWEEWRPTWARNWKPKDVYKNRSIELVQQQNVQLSLTEATEKAKQEFEKAGKDFLVETIKLGKLLRPNHLWGYYLFPDCYNHHYKKPGYNGSCFNVEIKRNDDLSWLWNESTALYPSIYLNTQQSPVAATLYVRNRVREAIRVSKIPDAKSPLPVFAYTRIVFTDQVLKFLSQDELVYTFGETVALGASGIVIWGSWENTRTKESCQAIKEYMDTTLNPYIINVTLAAKMCSQVLCQEQGVCIRKNWNSSDYLHLNPDNFAIQLEKGGKFTVRGKPTLEDLEQFSEKFYCSCYSTLSCKEKADVKDTDAVDVCIADGVCIDAF

SEQ ID NO: 204 - protein, 431 aa, artificial Sequence
  Hyaluronidase Variant
FRAPPVIPNVPFLWAWNAPSEFCLGKFDEPLDMSLFSFIGSPRINATGQGVTIFYVDRLGYYPYIDSITGVTVNGGIPQKISLQDHLDKAKKDITFAMPVDNLGMAVIDWEEWRPTWARNWKPKDVYKNRSIELVQQQNVQLSLTEATEKAKQEFEKAGKDFLVETIKLGKLLRPNHLWGYYLFPDCYNHHYKKPGYNGSCFNVEIKRNDDLSWLWNESTALYPSIYLNTQQSPVAATLYVRNRVREAIRVSKIPDAKSPLPVFAYTRIVFTDQVLKFLSQDELVYTFGETVALGASGIVIWGSWENTRTKESCQAIKEYMDTTLNPYIINVTLAAKMCSQVLCQEQGVCIRKNWNSSDYLHLNPDNFAIQLEKGGKFTVRGKPTLEDLEQFSEKFYCSCYSTLSCKEKADVKDTDAVDVCIADGVCIDAF

SEQ ID NO: 205 - protein, 431 aa, artificial Sequence
  Hyaluronidase Variant
FRAPPVIPNVPFLWAWNAPSEFCLGKFDEPLDMSLFSFIGSPRINATGQGVTIFYVDRLGYYPYIDSITGVTVNGGIPQKISLQDHLDKAKKDITFYMPVDNLGMAVIDWEEWRPTWARNWKPKDVYKNRSIELVQQQNVQLSLTEATEKAKQEFEKAGKDFLVETIKLGKLLRPNHLWGYYLFPDCYNHHYKKPGYNGSCFNAEIKRNDDLSWLWNESTALYPSIYLNTQQSPVAATLYVRNRVREAIRVSKIPDAKSPLPVFAYTRIVFTDQVLKFLSQDELVYTFGETVALGASGIVIWGSWENTRTKESCQAIKEYMDTTLNPYIINVTLAAKMCSQVLCQEQGVCIRKNWNSSDYLHLNPDNFAIQLEKGGKFTVRGKPTLEDLEQFSEKFYCSCYSTLSCKEKADVKDTDAVDVCIADGVCIDAF

SEQ ID NO: 206 - protein, 431 aa, artificial Sequence
  Hyaluronidase Variant
FRAPPVIPNVPFLWAWNAPSEFCLGKFDEPLDMSLFSFIGSPRINATGQGVTIFYVDRLGYYPYIDSITGVTVNGGIPQKISLQDHLDKAKKDITFYMPVDNLGMAVIDWEEWRPTWARNWKPKDVYKNRSIELVQQQNVQLSLTEATEKAKQEFEKAGKDFLVETIKLGKLLRPNHLWGYYLFPDCYNHHYKKPGYNGSCFNVAIKRNDDLSWLWNESTALYPSIYLNTQQSPVAATLYVRNRVREAIRVSKIPDAKSPLPVFAYTRIVFTDQVLKFLSQDELVYTFGETVALGASGIVIWGSWENTRTKESCQAIKEYMDTTLNPYIINVTLAAKMCSQVLCQEQGVCIRKNWNSSDYLHLNPDNFAIQLEKGGKFTVRGKPTLEDLEQFSEKFYCSCYSTLSCKEKADVKDTDAVDVCIADGVCIDAF

SEQ ID NO: 207 - protein, 431 aa, artificial Sequence
  Hyaluronidase Variant
FRAPPVIPNVPFLWAWNAPSEFCLGKFDEPLDMSLFSFIGSPRINATGQGVTIFYVDRLGYYPYIDSITGVTVNGGIPQKISLQDHLDKAKKDITFYMPVDNLGMAVIDWEEWRPTWARNWKPKDVYKNRSIELVQQQNVQLSLTEATEKAKQEFEKAGKDFLVETIKLGKLLRPNHLWGYYLFPDCYNHHYKKPGYNGSCFNVEAKRNDDLSWLWNESTALYPSIYLNTQQSPVAATLYVRNRVREAIRVSKIPDAKSPLPVFAYTRIVFTDQVLKFLSQDELVYTFGETVALGASGIVIWGSWENTRTKESCQAIKEYMDTTLNPYIINVTLAAKMCSQVLCQEQGVCIRKNWNSSDYLHLNPDNFAIQLEKGGKFTVRGKPTLEDLEQFSEKFYCSCYSTLSCKEKADVKDTDAVDVCIADGVCIDAF

SEQ ID NO: 208 - protein, 431 aa, artificial Sequence
  Hyaluronidase Variant
FRAPPVIPNVPFLWAWNAPSEFCLGKFDEPLDMSLFSFIGSPRINATGQGVTIFYVDRLGYYPYIDSITGVTVNGGIPQKISLQDHLDKAKKDITFYMPVDNLGMAVIDWEEWRPTWARNWKPKDVYKNRSIELVQQQNVQLSLTEATEKAKQEFEKAGKDFLVETIKLGKLLRPNHLWGYYLFPDCYNHHYKKPGYNGSCFNVEIARNDDLSWLWNESTALYPSIYLNTQQSPVAATLYVRNRVREAIRVSKIPDAKSPLPVFAYTRIVFTDQVLKFLSQDELVYTFGETVALGASGIVIWGSWENTRTKESCQAIKEYMDTTLNPYIINVTLAAKMCSQVLCQEQGVCIRKNWNSSDYLHLNPDNFAIQLEKGGKFTVRGKPTLEDLEQFSEKFYCSCYSTLSCKEKADVKDTDAVDVCIADGVCIDAF

SEQ ID NO: 209 - protein, 431 aa, artificial Sequence
  Hyaluronidase Variant
FRAPPVIPNVPFLWAWNAPSEFCLGKFDEPLDMSLFSFIGSPRINATGQGVTIFYVDRLGYYPYIDSITGVTVNGGIPQKISLQDHLDKAKKDITFYMPVDNLGMAVIDWEEWRPTWARNWKPKDVYKNRSIELVQQQNVQASLTEATEKAKQEFEKAGKDFLVETIKLGKLLRPNHLWGYYLFPDCYNHHYKKPGYNGSCFNVEIKRNDDLSWLWNESTALYPSIYLNTQQSPVAATLYVRNRVREAIRVSKIPDAKSPLPVFAYTRIVFTDQVLKFLSQDELVYTFGETVALGASGIVIWGSWENTRTKESCQAIKEYMDTTLNPYIINVTLAAKMCSQVLCQEQGVCIRKNWNSSDYLHLNPDNFAIQLEKGGKFTVRGKPTLEDLEQFSEKFYCSCYSTLSCKEKADVKDTDAVDVCIADGVCIDAF

SEQ ID NO: 210 - protein, 431 aa, artificial Sequence
  Hyaluronidase Variant
FRAPPVIPNVPFLWAWNAPSEFCLGKFDEPLDMSLFSFIGSPRINATGQGVTIFYVDRLGYYPYIDSITGVTVNGGIPQKISLQDHLDKAKKDITFYMPVDNLGMAVIDWEEWRPTWARNWKPKDVYKNRSIELVQQQNVQLALTEATEKAKQEFEKAGKDFLVETIKLGKLLRPNHLWGYYLFPDCYNHHYKKPGYNGSCFNVEIKRNDDLSWLWNESTALYPSIYLNTQQSPVAATLYVRNRVREAIRVSKIPDAKSPLPVFAYTRIVFTDQVLKFLSQDELVYTFGETVALGASGIVIWGSWENTRTKESCQAIKEYMDTTLNPYIINVTLAAKMCSQVLCQEQGVCIRKNWNSSDYLHLNPDNFAIQLEKGGKFTVRGKPTLEDLEQFSEKFYCSCYSTLSCKEKADVKDTDAVDVCIADGVCIDAF

SEQ ID NO: 211 - protein, 431 aa, artificial Sequence
  Hyaluronidase Variant
FRAPPVIPNVPFLWAWNAPSEFCLGKFDEPLDMSLFSFIGSPRINATGQGVTIFYVDRLGYYPYIDSITGVTVNGGIPQKISLQDHLDKAKKDITFYMPVDNLGMAVIDWEEWRPTWARNWKPKDVYKNRSIELVQQQNVQLSATEATEKAKQEFEKAGKDFLVETIKLGKLLRPNHLWGYYLFPDCYNHHYKKPGYNGSCFNVEIKRNDDLSWLWNESTALYPSIYLNTQQSPVAATLYVRNRVREAIRVSKIPDAKSPLPVFAYTRIVFTDQVLKFLSQDELVYTFGETVALGASGIVIWGSWENTRTKESCQAIKEYMDTTLNPYIINVTLAAKMCSQVLCQEQGVCIRKNWNSSDYLHLNPDNFAIQLEKGGKFTVRGKPTLEDLEQFSEKFYCSCYSTLSCKEKADVKDTDAVDVCIADGVCIDAF

SEQ ID NO: 212 - protein, 431 aa, artificial Sequence
  Hyaluronidase Variant
FRAPPVIPNVPFLWAWNAPSEFCLGKFDEPLDMSLFSFIGSPRINATGQGVTIFYVDRLGYYPYIDSITGVTVNGGIPQKISLQDHLDKAKKDITFYMPVDNLGMAVIDWEEWRPTWARNWKPKDVYKNRSIELVQQQNVQLSLAEATEKAKQEFEKAGKDFLVETIKLGKLLRPNHLWGYYLFPDCYNHHYKKPGYNGSCFNVEIKRNDDLSWLWNESTALYPSIYLNTQQSPVAATLYVRNRVREAIRVSKIPDAKSPLPVFAYTRIVFTDQVLKFLSQDELVYTFGETVALGASGIVIWGSWENTRTKESCQAIKEYMDTTLNPYIINVTLAAKMCSQVLCQEQGVCIRKNWNSSDYLHLNPDNFAIQLEKGGKFTVRGKPTLEDLEQFSEKFYCSCYSTLSCKEKADVKDTDAVDVCIADGVCIDAF

SEQ ID NO: 213 - protein, 431 aa, artificial Sequence
  Hyaluronidase Variant
FRAPPVIPNVPFLWAWNAPSEFCLGKFDEPLDMSLFSFIGSPRINATGQGVTIFYVDRLGYYPYIDSITGVTVNGGIPQKISLQDHLDKAKKDITFYMPVDNLGMAVIDWEEWRPTWARNWKPKDVYKNRSIELVQQQNVQLSLTEAAEKAKQEFEKAGKDFLVETIKLGKLLRPNHLWGYYLFPDCYNHHYKKPGYNGSCFNVEIKRNDDLSWLWNESTALYPSIYLNTQQSPVAATLYVRNRVREAIRVSKIPDAKSPLPVFAYTRIVFTDQVLKFLSQDELVYTFGETVALGASGIVIWGSWENTRTKESCQAIKEYMDTTLNPYIINVTLAAKMCSQVLCQEQGVCIRKNWNSSDYLHLNPDNFAIQLEKGGKFTVRGKPTLEDLEQFSEKFYCSCYSTLSCKEKADVKDTDAVDVCIADGVCIDAF

SEQ ID NO: 214 - protein, 431 aa, artificial Sequence
  Hyaluronidase Variant
FRAPPVIPNVPFLWAWNAPSEFCLGKFDEPLDMSLFSFIGSPRINATGQGVTIFYVDRLGYYPYIDSITGVTVNGGIPQKISLQDHLDKAKKDITFYMPVDNLGMAVIDWEEWRPTWARNWKPKDVYKNRSIELVQQQNVQLSLTEATAKAKQEFEKAGKDFLVETIKLGKLLRPNHLWGYYLFPDCYNHHYKKPGYNGSCFNVEIKRNDDLSWLWNESTALYPSIYLNTQQSPVAATLYVRNRVREAIRVSKIPDAKSPLPVFAYTRIVFTDQVLKFLSQDELVYTFGETVALGASGIVIWGSWENTRTKESCQAIKEYMDTTLNPYIINVTLAAKMCSQVLCQEQGVCIRKNWNSSDYLHLNPDNFAIQLEKGGKFTVRGKPTLEDLEQFSEKFYCSCYSTLSCKEKADVKDTDAVDVCIADGVCIDAF

SEQ ID NO: 215 - protein, 431 aa, artificial Sequence
  Hyaluronidase Variant
FRAPPVIPNVPFLWAWNAPSEFCLGKFDEPLDMSLFSFIGSPRINATGQGVTIFYVDRLGYYPYIDSITGVTVNGGIPQKISLQDHLDKAKKDITFYMPVDNLGMAVIDWEEWRPTWARNWKPKDVYKNRSIELVQQQNVQLSLTEATEAAKQEFEKAGKDFLVETIKLGKLLRPNHLWGYYLFPDCYNHHYKKPGYNGSCFNVEIKRNDDLSWLWNESTALYPSIYLNTQQSPVAATLYVRNRVREAIRVSKIPDAKSPLPVFAYTRIVFTDQVLKFLSQDELVYTFGETVALGASGIVIWGSWENTRTKESCQAIKEYMDTTLNPYIINVTLAAKMCSQVLCQEQGVCIRKNWNSSDYLHLNPDNFAIQLEKGGKFTVRGKPTLEDLEQFSEKFYCSCYSTLSCKEKADVKDTDAVDVCIADGVCIDAF

SEQ ID NO: 216 - protein, 431 aa, artificial Sequence
  Hyaluronidase Variant
FRAPPVIPNVPFLWAWNAPSEFCLGKFDEPLDMSLFSFIGSPRINATGQGVTIFYVDRLGYYPYIDSITGVTVNGGIPQKISLQDHLDKAKKDITFYMPVDNLGMAVIDWEEWRPTWARNWKPKDVYKNRSIELVQQQNVQLSLTEATEKAKQEFEKAGKDFLVETIKLGKLLRPNHLWGYYLFPDCYNHHYKKPGYNGSCFNVEIKRNDDLSWLWNESTALYPSIYLNTQQSPVAATLYVRNRVREAIRVSAIPDAKSPLPVFAYTRIVFTDQVLKFLSQDELVYTFGETVALGASGIVIWGSWENTRTKESCQAIKEYMDTTLNPYIINVTLAAKMCSQVLCQEQGVCIRKNWNSSDYLHLNPDNFAIQLEKGGKFTVRGKPTLEDLEQFSEKFYCSCYSTLSCKEKADVKDTDAVDVCIADGVCIDAF

SEQ ID NO: 217 - protein, 431 aa, artificial Sequence
  Hyaluronidase Variant
FRAPPVIPNVPFLWAWNAPSEFCLGKFDEPLDMSLFSFIGSPRINATGQGVTIFYVDRLGYYPYIDSITGVTVNGGIPQKISLQDHLDKAKKDITFYMPVDNLGMAVIDWEEWRPTWARNWKPKDVYKNRSIELVQQQNVQLSLTEATEKAKQEFEKAGKDFLVETIKLGKLLRPNHLWGYYLFPDCYNHHYKKPGYNGSCFNVEIKRNDDLSWLWNESTALYPSIYLNTQQSPVAATLYVRNRVREAIRVSKAPDAKSPLPVFAYTRIVFTDQVLKFLSQDELVYTFGETVALGASGIVIWGSWENTRTKESCQAIKEYMDTTLNPYIINVTLAAKMCSQVLCQEQGVCIRKNWNSSDYLHLNPDNFAIQLEKGGKFTVRGKPTLEDLEQFSEKFYCSCYSTLSCKEKADVKDTDAVDVCIADGVCIDAF

SEQ ID NO: 218 - protein, 431 aa, artificial Sequence
  Hyaluronidase Variant
FRAPPVIPNVPFLWAWNAPSEFCLGKFDEPLDMSLFSFIGSPRINATGQGVTIFYVDRLGYYPYIDSITGVTVNGGIPQKISLQDHLDKAKKDITFYMPVDNLGMAVIDWEEWRPTWARNWKPKDVYKNRSIELVQQQNVQLSLTEATEKAKQEFEKAGKDFLVETIKLGKLLRPNHLWGYYLFPDCYNHHYKKPGYNGSCFNVEIKRNDDLSWLWNESTALYPSIYLNTQQSPVAATLYVRNRVREAIRVSKIADAKSPLPVFAYTRIVFTDQVLKFLSQDELVYTFGETVALGASGIVIWGSWENTRTKESCQAIKEYMDTTLNPYIINVTLAAKMCSQVLCQEQGVCIRKNWNSSDYLHLNPDNFAIQLEKGGKFTVRGKPTLEDLEQFSEKFYCSCYSTLSCKEKADVKDTDAVDVCIADGVCIDAF

SEQ ID NO: 219 - protein, 431 aa, artificial Sequence
  Hyaluronidase Variant
FRAPPVIPNVPFLWAWNAPSEFCLGKFDEPLDMSLFSFIGSPRINATGQGVTIFYVDRLGYYPYIDSITGVTVNGGIPQKISLQDHLDKAKKDITFYMPVDNLGMAVIDWEEWRPTWARNWKPKDVYKNRSIELVQQQNVQLSLTEATEKAKQEFEKAGKDFLVETIKLGKLLRPNHLWGYYLFPDCYNHHYKKPGYNGSCFNVEIKRNDDLSWLWNESTALYPSIYLNTQQSPVAATLYVRNRVREAIRVSKIPDAKSPLPVFAYTRIVFTDQVLKFLSQDELVYTFGETVALGASGIVIWGSWENTRTKESCQAIKEYMDTTLNPYIINVTLAAKMCSQVLCQEQGVCIRKNWNSSDYLHLNPDNFAIQLEKGGKFTVRGKPTLEDLEQFSEKFYCSCYSTASCKEKADVKDTDAVDVCIADGVCIDAF

SEQ ID NO: 220 - protein, 431 aa, artificial Sequence
  Hyaluronidase Variant
FRAPPVIPNVPFLWAWNAPSEFCLGKFDEPLDMSLFSFIGSPRINATGQGVTIFYVDRLGYYPYIDSITGVTVNGGIPQKISLQDHLDKAKKDITFYMPVDNLGMAVIDWEEWRPTWARNWKPKDVYKNRSIELVQQQNVQLSLTEATEKAKQEFEKAGKDFLVETIKLGKLLRPNHLWGYYLFPDCYNHHYKKPGYNGSCFNVEIKRNDDLSWLWNESTALYPSIYLNTQQSPVAATLYVRNRVREAIRVSKIPDAKSPLPVFAYTRIVFTDQVLKFLSQDELVYTFGETVALGASGIVIWGSWENTRTKESCQAIKEYMDTTLNPYIINVTLAAKMCSQVLCQEQGVCIRKNWNSSDYLHLNPDNFAIQLEKGGKFTVRGKPTLEDLEQFSEKFYCSCYSTLACKEKADVKDTDAVDVCIADGVCIDAF

SEQ ID NO: 221 - protein, 431 aa, artificial Sequence
  Hyaluronidase Variant
FRAPPVIPNVPFLWAWNAPSEFCLGKFDEPLDMSLFSFIGSPRINATGQGVTIFYVDRLGYYPYIDSITGVTVNGGIPQKISLQDHLDKAKKDITFYMPVDNLGMAVIDWEEWRPTWARNWKPKDVYKNRSIELVQQQNVQLSLTEATEKAKQEFEKAGKDFLVETIKLGKLLRPNHLWGYYLFPDCYNHHYKKPGYNGSCFNVEIKRNDDLSWLWNESTALYPSIYLNTQQSPVAATLYVRNRVREAIRVSKIPDAKSPLPVFAYTRIVFTDQVLKFLSQDELVYTFGETVALGASGIVIWGSWENTRTKESCQAIKEYMDTTLNPYIINVTLAAKMCSQVLCQEQGVCIRKNWNSSDYLHLNPDNFAIQLEKGGKFTVRGKPTLEDLEQFSEKFYCSCYSTLSCKEKADVKATDAVDVCIADGVCIDAF

SEQ ID NO: 222 - protein, 431 aa, artificial Sequence
  Hyaluronidase Variant
FRAPPVIPNVPFLWAWNAPSEFCLGKFDEPLDMSLFSFIGSPRINATGQGVTIFYVDRLGYYPYIDSITGVTVNGGIPQKISLQDHLDKAKKDITFYMPVDNLGMAVIDWEEWRPTWARNWKPKDVYKNRSIELVQQQNVQLSLTEATEKAKQEFEKAGKDFLVETIKLGKLLRPNHLWGYYLFPDCYNHHYKKPGYNGSCFNVEIKRNDDLSWLWNESTALYPSIYLNTQQSPVAATLYVRNRVREAIRVSKIPDAKSPLPVFAYTRIVFTDQVLKFLSQDELVYTFGETVALGASGIVIWGSWENTRTKESCQAIKEYMDTTLNPYIINVTLAAKMCSQVLCQEQGVCIRKNWNSSDYLHLNPDNFAIQLEKGGKFTVRGKPTLEDLEQFSEKFYCSCYSTLSCKEKADVKDADAVDVCIADGVCIDAF

SEQ ID NO: 223 - protein, 431 aa, artificial Sequence
  Hyaluronidase Variant
FRAPPVIPNVPFLWAWNAPSEFCLGKFDEPLDMSLFSFIGSPRINATGQGVTIFYVDRLGYYPYIDSITGVTVNGGIPQKISLQDHLDKAKKDITFYMPVDNLGMAVIDWEEWRPTWARNWKPKDVYKNRSIELVQQQNVQLSLTEATEKAKQEFEKAGKDFLVETIKLGKLLRPNHLWGYYLFPDCYNHHYKKPGYNGSCFNVEIKRNDDLSWLWNESTALYPSIYLNTQQSPVAATLYVRNRVREAIRVSKIPDAKSPLPVFAYTRIVFTDQVLKFLSQDELVYTFGETVALGASGIVIWGSWENTRTKESCQAIKEYMDTTLNPYIINVTLAAKMCSQVLCQEQGVCIRKNWNSSDYLHLNPDNFAIQLEKGGKFTVRGKPTLEDLEQFSEKFYCSCYSTLSCKEKADVKDTAAVDVCIADGVCIDAF

SEQ ID NO: 224 - protein, 431 aa, artificial Sequence
  Hyaluronidase Variant
FRAPPVIPNVPFLWAWNAPSEFCLGKFDEPLDMSLFSFIGSPRINATGQGVTIFYVDRLGYYPYIDSITGVTVNGGIPQKISLQDHLDKAKKDITFYMPVDNLGMAVIDWEEWRPTWARNWKPKDVYKNRSIELVQQQNVQLSLTEATEKAKQEFEKAGKDFLVETIKLGKLLRPNHLWGYYLFPDCYNHHYKKPGYNGSCFNVEIKRNDDLSWLWNESTALYPSIYLNTQQSPVAATLYVRNRVREAIRVSKIPDAKSPLPVFAYTRIVFTDQVLKFLSQDELVYTFGETVALGASGIVIWGSWENTRTKESCQAIKEYMDTTLNPYIINVTLAAKMCSQVLCQEQGVCIRKNWNSSDYLHLNPDNFAIQLEKGGKFTVRGKPTLEDLEQFSEKFYCSCYSTLSCKEKADVKDTDAVDVCIAAGVCIDAF

SEQ ID NO: 225 - protein, 431 aa, artificial Sequence
  Hyaluronidase Variant
FRAPPVIPNVPFLWAWNAPSEFCLGKFDEPLDMSLFSFIGSPRINATGQGVTIFYVDRLGYYPYIDSITGVTVNGGIPQKISLQDHLDKAKKDITFYMPVDNLGMAVIDWEEWRPTWARNWKPKDVYKNRSIELVQQQNVQLSLTEATEKAKQEFEKAGKDFLVETIKLGKLLRPNHLWGYYLFPDCYNHHYKKPGYNGSCFNVEIKRNDDLSWLWNESTALYPSIYLNTQQSPVAATLYVRNRVREAIRVSKIPDAKSPLPVFAYTRIVFTDQVLKFLSQDELVYTFGETVALGASGIVIWGSWENTRTKESCQAIKEYMDTTLNPYIINVTLAAKMCSQVLCQEQGVCIRKNWNSSDYLHLNPDNFAIQLEKGGKFTVRGKPTLEDLEQFSEKFYCSCYSTLSCKEKADVKDTDAVDVCIADAVCIDAF

SEQ ID NO: 226 - protein, 431 aa, artificial Sequence
  Hyaluronidase Variant
FRAPPVIPNVPFLWAWNAPSEFCLGKFDEPLDMSLFSFIGSPRINATGQGVTIFYVDRLGYYPYIDSITGVTVNGGIPQKISLQDHLDKAKKDITFYMPVDNLGMAVIDWEEWRPTWARNWKPKDVYKNRSIELVQQQNVQLSLTEATEKAKQEFEKAGKDFLVETIKLGKLLRPNHLWGYYLFPDCYNHHYKKPGYNGSCFNVEIKRNDDLSWLWNESTALYPSIYLNTQQSPVAATLYVRNRVREAIRVSKIPDAKSPLPVFAYTRIVFTDQVLKFLSQDELVYTFGETVALGASGIVIWGSWENTRTKESCQAIKEYMDTTLNPYIINVTLAAKMCSQVLCQEQGVCIRKNWNSSDYLHLNPDNFAIQLEKGGKFTVRGKPTLEDLEQFSEKFYCSCYSTLSCKEKADVKDTDAVDVCIADGACIDAF

SEQ ID NO: 227 - protein, 431 aa, artificial Sequence
  Hyaluronidase Variant
FRAPPVIPNVPFLWAWNAPSEFCLGKFDEPLDMSLFSFIGSPRIAATGQGVTIFYVDRLGYYPYIDSITGVTVNGGIPQKISLQDHLDKAKKDITFYMPVDNLGMAVIDWEEWRPTWARNWKPKDVYKNRSIELVQQQNVQLSLTEATEKAKQEFEKAGKDFLVETIKLGKLLRPNHLWGYYLFPDCYNHHYKKPGYNGSCFNVEIKRNDDLSWLWNESTALYPSIYLNTQQSPVAATLYVRNRVREAIRVSKIPDAKSPLPVFAYTRIVFTDQVLKFLSQDELVYTFGETVALGASGIVIWGSWENTRTKESCQAIKEYMDTTLNPYIINVTLAAKMCSQVLCQEQGVCIRKNWNSSDYLHLNPDNFAIQLEKGGKFTVRGKPTLEDLEQFSEKFYCSCYSTLSCKEKADVKDTDAVDVCIADGVCIDAF

SEQ ID NO: 228 - protein, 431 aa, artificial Sequence
  Hyaluronidase Variant
FRAPPVIPNVPFLWAWNAPSEFCLGKFDEPLDMSLFSFIGSPRINATGQGVTIFYVDRLGYYPYIDSITGVTVNGGIPQKISLQDHLDKAKKDITFYMPVDNLGMAVIDWEEWRPTWARNWKPKDVYKARSIELVQQQNVQLSLTEATEKAKQEFEKAGKDFLVETIKLGKLLRPNHLWGYYLFPDCYNHHYKKPGYNGSCFNVEIKRNDDLSWLWNESTALYPSIYLNTQQSPVAATLYVRNRVREAIRVSKIPDAKSPLPVFAYTRIVFTDQVLKFLSQDELVYTFGETVALGASGIVIWGSWENTRTKESCQAIKEYMDTTLNPYIINVTLAAKMCSQVLCQEQGVCIRKNWNSSDYLHLNPDNFAIQLEKGGKFTVRGKPTLEDLEQFSEKFYCSCYSTLSCKEKADVKDTDAVDVCIADGVCIDAF

SEQ ID NO: 229 - protein, 431 aa, artificial Sequence
  Hyaluronidase Variant
FRAPPVIPNVPFLWAWNAPSEFCLGKFDEPLDMSLFSFIGSPRINATGQGVTIFYVDRLGYYPYIDNITGVTVNGGIPQKISLQDHLDKAKKDITFYMPVDNLGMAVIDWEEWRPTWARNWKPKDVYKNRSIELVQQQNVQLSLTEATEKAKQEFEKAGKDFLVETIKLGKLLRPNHLWGYYLFPDCYNHHYKKPGYNGSCFNVEIKRNDDLSWLWNESTALYPSIYLNTQQSPVAATLYVRNRVREAIRVSKIPDAKSPLPVFAYTRIVFTDQVLKFLSQDELVYTFGETVALGASGIVIWGSWENTRTKESCQAIKEYMDTTLNPYIINVTLAAKMCSQVLCQEQGVCIRKNWNSSDYLHLNPDNFAIQLEKGGKFTVRGKPTLEDLEQFSEKFYCSCYSTLSCKEKADVKDTDAVDVCIADGVCIDAF

SEQ ID NO: 230 - protein, 431 aa, artificial Sequence
  Hyaluronidase Variant
FRAPPVIPNVPFLWAWNAPSEFCLGKFDEPLDMSLFSFIGSPRINATGQGVTIFYVDRLGYYPYIDSQTGVTVNGGIPQKISLQDHLDKAKKDITFYMPVDNLGMAVIDWEEWRPTWARNWKPKDVYKNRSIELVQQQNVQLSLTEATEKAKQEFEKAGKDFLVETIKLGKLLRPNHLWGYYLFPDCYNHHYKKPGYNGSCFNVEIKRNDDLSWLWNESTALYPSIYLNTQQSPVAATLYVRNRVREAIRVSKIPDAKSPLPVFAYTRIVFTDQVLKFLSQDELVYTFGETVALGASGIVIWGSWENTRTKESCQAIKEYMDTTLNPYIINVTLAAKMCSQVLCQEQGVCIRKNWNSSDYLHLNPDNFAIQLEKGGKFTVRGKPTLEDLEQFSEKFYCSCYSTLSCKEKADVKDTDAVDVCIADGVCIDAF

SEQ ID NO: 231 - protein, 431 aa, artificial Sequence
  Hyaluronidase Variant
FRAPPVIPNVPFLWAWNAPSEFCLGKFDEPLDMSLFSFIGSPRINATGQGVTIFYVDRLGYYPYIDSITGVTVNGGIPQKISLQDHLDKAKKDITFYMPVDNLGMAVIDWEEWRPTWARNWKPKDVYKNRSIELVQQQNVQLSLTEATEKAKQEFEKAGKDFLVETIKLGKLLRPNHLWGYYLFPDCYNHHYKKPGYNGSCFNVEIKRNDDLSWLWNESTALYPSIYLNTDQSPVAATLYVRNRVREAIRVSKIPDAKSPLPVFAYTRIVFTDQVLKFLSQDELVYTFGETVALGASGIVIWGSWENTRTKESCQAIKEYMDTTLNPYIINVTLAAKMCSQVLCQEQGVCIRKNWNSSDYLHLNPDNFAIQLEKGGKFTVRGKPTLEDLEQFSEKFYCSCYSTLSCKEKADVKDTDAVDVCIADGVCIDAF

SEQ ID NO: 232 - protein, 431 aa, artificial Sequence
  Hyaluronidase Variant
FRAPPVIPNVPFLWAWNAPSEFCLGKFDEPLDMSLFSFIGSPRINATGQGVTIFYVDRLGYYPYIDSITGVTVNGGIPQKISLQDHLDKAKKDITFYMPVDNLGMAVIDWEEWRPTWARNWKPKDVYKNRSIELVQQQNVQLSLTEATEKAKQEFEKAGKDFLVETIKLGKLLRPNHLWGYYLFPDCYNHHYKKPGYNGSCFNVEIKRNDDLSWLWNESTALYPSIYLNTIQSPVAATLYVRNRVREAIRVSKIPDAKSPLPVFAYTRIVFTDQVLKFLSQDELVYTFGETVALGASGIVIWGSWENTRTKESCQAIKEYMDTTLNPYIINVTLAAKMCSQVLCQEQGVCIRKNWNSSDYLHLNPDNFAIQLEKGGKFTVRGKPTLEDLEQFSEKFYCSCYSTLSCKEKADVKDTDAVDVCIADGVCIDAF

SEQ ID NO: 233 - protein, 431 aa, artificial Sequence
  Hyaluronidase Variant
FRAPPVIPNVPFLWAWNAPSEFCLGKFDEPLDMSLFSFIGSPRINATGQGVTIFYVDRLGYYPYIDSITGVTVNGGIPQKISLQDHLDKAKKDITFYMPVDNLGMAVIDWEEWRPTWARNWKPKDVYKNRSIELVQQQNVQLSLTEATEKAKQEFEKAGKDFLVETIKLGKLLRPNHLWGYYLFPDCYNHHYKKPGYNGSCFNVEIKRNDDLSWLWNESTALYPSIYLNTQQSPVAATLYVRNRVREAIRVSKGPDAKSPLPVFAYTRIVFTDQVLKFLSQDELVYTFGETVALGASGIVIWGSWENTRTKESCQAIKEYMDTTLNPYIINVTLAAKMCSQVLCQEQGVCIRKNWNSSDYLHLNPDNFAIQLEKGGKFTVRGKPTLEDLEQFSEKFYCSCYSTLSCKEKADVKDTDAVDVCIADGVCIDAF

SEQ ID NO: 234 - protein, 431 aa, artificial Sequence
  Hyaluronidase Variant
FRAPPVIPNVPFLWAWNAPSEFCLGKFDEPLDMSLFSFIGSPRINATGQGVTIFYVDRLGYYPYIDSITGVTVNGGIPQKISLQDHLDKAKKDITFYMPVDNLGMAVIDWEEWRPTWARNWKPKDVYKNRSIELVQQQNVQLSLTEATEKAKQEFEKAGKDFLVETIKLGKLLRPNHLWGYYLFPDCYNHHYKKPGYNGSCFNVEIKRNDDLSWLWNESTALYPSIYLNTQQSPVAATLYVRNRVREAIRVSKIDDAKSPLPVFAYTRIVFTDQVLKFLSQDELVYTFGETVALGASGIVIWGSWENTRTKESCQAIKEYMDTTLNPYIINVTLAAKMCSQVLCQEQGVCIRKNWNSSDYLHLNPDNFAIQLEKGGKFTVRGKPTLEDLEQFSEKFYCSCYSTLSCKEKADVKDTDAVDVCIADGVCIDAF

SEQ ID NO: 235 - protein, 431 aa, artificial Sequence
  Hyaluronidase Variant
FRAPPVIPNVPFLWAWNAPSEFCLGKFDEPLDMSLFSFIGSPRINATGQGVTIFYVDRLGYYPYIDSITGVTVNGGIPQKISLQDHLDKAKKDITFYMPVDNLGMAVIDWEEWRPTWARNWKPKDVYKNRSIELVQQQNVQLSLTEATEKAKQEFEKAGKDFLVETIKLGKLLRPNHLWGYYLFPDCYNHHYKKPGYNGSCFNVEIKRNDDLSWLWNESTALYPSIYLNTQQSPVAATLYVRNRVREAIRVSKIPDAKSPLPVFAYTRIVFTDQVLKFLSQDELVYTFGETVALGASGIVIWGSWENTRTKESCQAIKEYMDTTLNPYIINVTLAAKMCSQVLCQEQGVCIRKNWNSSDYLHLNPDNFAIQLEKGGKFTVRGKPTLEDLEQFSEKFYCSCYSTLSCKEKADVKDDDAVDVCIADGVCIDAF

SEQ ID NO: 236 - protein, 431 aa, artificial Sequence
  Hyaluronidase Variant
FRAPPVIPNVPFLWAWNAPSEFCLGKFDEPLDMSLFSFIGSPRINATGQGVTIFYVDRLGYYPYIDSITGVTVNGGIPQKISLQDHLDKAKKDITFYMPVDNLGMAVIDWEEWRPTWARNWKPKDVYKNRSIELVQQQNVQLSLTEATEKAKQEFEKAGKDFLVETIKLGKLLRPNHLWGYYLFPDCYNHHYKKPGYNGSCFNVEIKRNDDLSWLWNESTALYPSIYLNTQQSPVAATLYVRNRVREAIRVSKIPDAKSPLPVFAYTRIVFTDQVLKFLSQDELVYTFGETVALGASGIVIWGSWENTRTKESCQAIKEYMDTTLNPYIINVTLAAKMCSQVLCQEQGVCIRKNWNSSDYLHLNPDNFAIQLEKGGKFTVRGKPTLEDLEQFSEKFYCSCYSTLSCKEKADVKDHDAVDVCIADGVCIDAF

SEQ ID NO: 237 - protein, 431 aa, artificial Sequence
  Hyaluronidase Variant
FRAPPVIPNVPFLWAWNAPSEFCLGKFDEPLDMSLFSFIGSPRINATGQGVTIFYVDRLGYYPYIDSITGVTVNGGIPQKISLQDHLDKAKKDITFYMPVDNLGMAVIDWEEWRPTWARNWKPKDVYKNRSIELVQQQNVQLSLTEATEKAKQEFEKAGKDFLVETIKLGKLLRPNHLWGYYLFPDCYNHHYKKPGYNGSCFNVEIKRNDDLSWLWNESTALYPSIYLNTQQSPVAATLYVRNRVREAIRVSKIPDAKSPLPVFAYTRIVFTDQVLKFLSQDELVYTFGETVALGASGIVIWGSWENTRTKESCQAIKEYMDTTLNPYIINVTLAAKMCSQVLCQEQGVCIRKNWNSSDYLHLNPDNFAIQLEKGGKFTVRGKPTLEDLEQFSEKFYCSCYSTLSCKEKADVKDKDAVDVCIADGVCIDAF

SEQ ID NO: 238 - protein, 431 aa, artificial Sequence
  Hyaluronidase Variant
FRAPPVIPNVPFLWAWNAPSEFCLGKFDEPLDMSLFSFIGSPRINATGQGVTIFYVDRLGYYPYIDSITGVTVNGGIPQKISLQDHLDKAKKDITFYMPVDNLGMAVIDWEEWRPTWARNWKPKDVYKNRSIELVQQQNVQLSLTEATEKAKQEFEKAGKDFLVETIKLGKLLRPNHLWGYYLFPDCYNHHYKKPGYNGSCFNVEIKRNDDLSWLWNESTALYPSIYLNTQQSPVAATLYVRNRVREAIRVSKIPDAKSPLPVFAYTRIVFTDQVLKFLSQDELVYTFGETVALGASGIVIWGSWENTRTKESCQAIKEYMDTTLNPYIINVTLAAKMCSQVLCQEQGVCIRKNWNSSDYLHLNPDNFAIQLEKGGKFTVRGKPTLEDLEQFSEKFYCSCYSTLSCKEKADVKDGDAVDVCIADGVCIDAF

SEQ ID NO: 239 - protein, 431 aa, artificial Sequence
  Hyaluronidase Variant
FRAPPVIPNVPFLWAWNAPSEFCLGKFDEPLDMSLFSFIGSPRINATGQGVTIFYVDRLGYYPYIDSITGVTVNGGIPQKISLQDHLDKAKKDITFYMPVDNLGMAVIDWEEWRPTWARNWKPKDVYKNRSIELVQQQNVQLSLTEATEKAKQEFEKAGKDFLVETIKLGKLLRPNHLWGYYLFPDCYNHHYKKPGYNGSCFNVEIKRNDDLSWLWNESTALYPSIYLNTQQSPVAATLYVRNRVREAIRVSKIPDAKSPLPVFAYTRIVFTDQVLKFLSQDELVYTFGETVALGASGIVIWGSWENTRTKESCQAIKEYMDTTLNPYIINVTLAAKMCSQVLCQEQGVCIRKNWNSSDYLHLNPDNFAIQLEKGGKFTVRGKPTLEDLEQFSEKFYCSCYSTLSCKEKADVKDPDAVDVCIADGVCIDAF

SEQ ID NO: 240 - protein, 431 aa, artificial Sequence
  Hyaluronidase Variant
FRAPPVIPNVPFLWAWNAPSEFCLGKFDEPLDMSLFSFIGSPRINATGQGVTIFYVDRLGYYPYIDSITGVTVNGGIPQKISLQDHLDKAKKDITFYMPVDNLGMAVIDWEEWRPTWARNWKPKDVYKNRSIELVQQQNVQLSLTEATEKAKQEFEKAGKDFLVETIKLGKLLRPNHLWGYYLFPDCYNHHYKKPGYNGSCFNVEIKRNDDLSWLWNESTALYPSIYLNTQQSPVAATLYVRNRVREAIRVSKIPDAKSPLPVFAYTRIVFTDQVLKFLSQDELVYTFGETVALGASGIVIWGSWENTRTKESCQAIKEYMDTTLNPYIINVTLAAKMCSQVLCQEQGVCIRKNWNSSDYLHLNPDNFAIQLEKGGKFTVRGKPTLEDLEQFSEKFYCSCYSTLSCKEKADVKDMDAVDVCIADGVCIDAF

SEQ ID NO: 241 - protein, 431 aa, artificial Sequence
  Hyaluronidase Variant
FRAPPVIPNVPFLWAWNAPSEFCLGKFDEPLDMSLFSFIGSPRINATGQGVTIFYVDRLGYYPYIDSITGVTVNGGIPQKISLQDHLDKAKKDITFYMPVDNLGMAVIDWEEWRPTWARNWKPKDVYKNRSIELVQQQNVQLSLTEATEKAKQEFEKAGKDFLVETIKLGKLLRPNHLWGYYLFPDCYNHHYKKPGYNGSCFNVEIKRNDDLSWLWNESTALYPSIYLNTQQSPVAATLYVRNRVREAIRVSKIPDAKSPLPVFAYTRIVFTDQVLKFLSQDELVYTFGETVALGASGIVIWGSWENTRTKESCQAIKEYMDTTLNPYIINVTLAAKMCSQVLCQEQGVCIRKNWNSSDYLHLNPDNFAIQLEKGGKFTVRGKPTLEDLEQFSEKFYCSCYSTLSCKEKADVKDFDAVDVCIADGVCIDAF

SEQ ID NO: 242 - protein, 431 aa, artificial Sequence
  Hyaluronidase Variant
FRAPPVIPNVPFLWAWNAPSEFCLGKFDEPLDMSLFSFIGSPRINATGQGVTIFYVDRLGYYPYIDSITGVTVNGGIPQKISLQDHLDKAKKDITFYMPVDNLGMAVIDWEEWRPTWARNWKPKDVYKNRSIELVQQQNVQLSLTEATEKAKQEFEKAGKDFLVETIKLGKLLRPNHLWGYYLFPDCYNHHYKKPGYNGSCFNVEIKRNDDLSWLWNESTALYPSIYLNTQQSPVAATLYVRNRVREAIRVSKIPDAKSPLPVFAYTRIVFTDQVLKFLSQDELVYTFGETVALGASGIVIWGSWENTRTKESCQAIKEYMDTTLNPYIINVTLAAKMCSQVLCQEQGVCIRKNWNSSDYLHLNPDNFAIQLEKGGKFTVRGKPTLEDLEQFSEKFYCSCYSTLSCKEKADVKDTDAVDVCIARGVCIDAF

SEQ ID NO: 243 - protein, 431 aa, artificial Sequence
  Hyaluronidase Variant
FRAPPVIPNVPFLWAWNAPSEFCLGKFDEPLDMSLFSFIGSPRINATGQGVTIFYVDRLGYYPYIDSITGVTVNGGIPQKISLQDHLDKAKKDITFYMPVDNLGMAVIDWEEWRPTWARNWKPKDVYKNRSIELVQQQNVQLSLTEATEKAKQEFEKAGKDFLVETIKLGKLLRPNHLWGYYLFPDCYNHHYKKPGYNGSCFNVEIKRNDDLSWLWNESTALYPSIYLNTQQSPVAATLYVRNRVREAIRVSKIPDAKSPLPVFAYTRIVFTDQVLKFLSQDELVYTFGETVALGASGIVIWGSWENTRTKESCQAIKEYMDTTLNPYIINVTLAAKMCSQVLCQEQGVCIRKNWNSSDYLHLNPDNFAIQLEKGGKFTVRGKPTLEDLEQFSEKFYCSCYSTLSCKEKADVKDTDAVDVCIADGYCIDAF

SEQ ID NO: 244 - protein, 431 aa, artificial Sequence
  Hyaluronidase Variant
FRAPPVIPNVPFLWAWNAPSEFCLGKFDEPLDMSLFSFIGSPRINATGQGVTIFYVDRLGYYPYIDSITGVTVNGGIPQKISLQDHLDKAKKDITFYMPVDNLGMAVIDWEEWRPTWARNWKPKDVYKNRSIELVQQQNVQLTLTEATEKAKQEFEKAGKDFLVETIKLGKLLRPNHLWGYYLFPDCYNHHYKKPGYNGSCFNVEIKRNDDLSWLWNESTALYPSIYLNTQQSPVAATLYVRNRVREAIRVSKIPDAKSPLPVFAYTRIVFTDQVLKFLSQDELVYTFGETVALGASGIVIWGSWENTRTKESCQAIKEYMDTTLNPYIINVTLAAKMCSQVLCQEQGVCIRKNWNSSDYLHLNPDNFAIQLEKGGKFTVRGKPTLEDLEQFSEKFYCSCYSTLSCKEKADVKDTDAVDVCIADGVCIDAF

SEQ ID NO: 245 - protein, 431 aa, artificial Sequence
  Hyaluronidase Variant
FRAPPVIPNVPFLWAWNAPSEFCLGKFDEPLDMSLFSFIGSPRINATGQGVTIFYVDRLGYYPYIDSITGVTVNGGIPQKISLQDHLDKAKKDITFYMPVDNLGMAVIDWEEWRPTWARNWKPKDVYKNRSIELVQQQNVQLSLTEATEKAKQEFEKAGKDFLVETIKLGKLLRPNHLWGYYLFPDCYNHHYKKPGYNGSCFNVEIKRNDDLSWLWNESTALYPSIYLNTQQSPVAATLYVRNRVREAIRVSKIPDAKSPLPVFAYTRIVFTDQVLKFLSQDELVYTFGETVALGASGIVIWGSWENTRTKESCQAIKEYMDTTLNPYIINVTLAAKMCSQVLCQEQGVCIRKNWNSSDYLHLNPDNFAIQLEKGGKFTVRGKPTLEDLEQFSEKFYCSCYSTLSCKEKADVKSTDAVDVCIADGVCIDAF

SEQ ID NO: 246 - protein, 431 aa, artificial Sequence
  Hyaluronidase Variant
FRAPPVIPNVPFLWAWNAPSEFCLGKFDEPLDMSLFSFIGSPRINATGQGVTIFYVDRLGYYPYIDSITGVTVNGGIPQKISLQDHLDKAKKDITFYMPVDNLGMAVIDWEEWRPTWARNWKPKDVYKNRSIELVQQQNVQLSLTEATEKAKQEFEKAGKDFLVETIKLGKLLRPNHLWGYYLFPDCYNHHYKKPGYNGSCFNVEIKRNDDLSWLWNESTALYPSIYLNTQQSPVAATLYVRNRVREAIRVSKIPDAKSPLPVFAYTRIVFTDQVPKFLSQDELVYTFGETVALGASGIVIWGSWENTRTKESCQAIKEYMDTTLNPYIINVTLAAKMCSQVLCQEQGVCIRKNWNSSDYLHLNPDNFAIQLEKGGKFTVRGKPTLEDLEQFSEKFYCSCYSTLSCKEKADVKDTDAVDVCIADGVCIDAF

SEQ ID NO: 247 - protein, 431 aa, artificial Sequence
  Hyaluronidase Variant
FRAPPVIPNVPFLWAWNAPSEFCLGKFDEPLDMSLFSFIGSPRINATGQGVTIFYVDRLGYYPYIDSITGVTVNGGIPQKISLQDHLDKAKKDITFYMPVDNLGMAVIDWEEWRPTWARNWKPKDVYKNRSIELVQQQNVQLSLTEATEKAKQEFEKAGKDFLVETIKLGKLLRPNHLWGYYLFPDCYNHHYKKPGYNGSCFNVEIKRNDDLSWLWNESTALYPSIYLNTQQSPVAATLYVRNRVREAIRVSKIPDAKSPLPVFAYTRIVFTDQVMKFLSQDELVYTFGETVALGASGIVIWGSWENTRTKESCQAIKEYMDTTLNPYIINVTLAAKMCSQVLCQEQGVCIRKNWNSSDYLHLNPDNFAIQLEKGGKFTVRGKPTLEDLEQFSEKFYCSCYSTLSCKEKADVKDTDAVDVCIADGVCIDAF

SEQ ID NO: 248 - protein, 431 aa, artificial Sequence
  Hyaluronidase Variant
FRAPPVIPNVPFLWAWNAPSEFCLGKFDEPLDMSLFSFIGSPRINATGQGVTIFYVDRLGYYPYIDSITGVTVNGGIPQKISLQDHLDKAKKDITFYMPVDNLGMAVIDWEEWRPTWARNWKPKDVYKNRSIELVQQQNVQSSLTEATEKAKQEFEKAGKDFLVETIKLGKLLRPNHLWGYYLFPDCYNHHYKKPGYNGSCFNVEIKRNDDLSWLWNESTALYPSIYLNTQQSPVAATLYVRNRVREAIRVSKIPDAKSPLPVFAYTRIVFTDQVLKFLSQDELVYTFGETVALGASGIVIWGSWENTRTKESCQAIKEYMDTTLNPYIINVTLAAKMCSQVLCQEQGVCIRKNWNSSDYLHLNPDNFAIQLEKGGKFTVRGKPTLEDLEQFSEKFYCSCYSTLSCKEKADVKDTDAVDVCIADGVCIDAF

SEQ ID NO: 249 - protein, 431 aa, artificial Sequence
  Hyaluronidase Variant
FRAPPVIPNVPFLWAWNAPSEFCLGKFDEPLDMSLFSFIGSPRINATGQGVTIFYVDRLGYYPYIDSITGVTVNGGIPQKISLQDHLDKAKKDITFYMPVDNLGMAVIDWEEWRPTWARNWKPKDVYKNRSIELVQQQNVQISLTEATEKAKQEFEKAGKDFLVETIKLGKLLRPNHLWGYYLFPDCYNHHYKKPGYNGSCFNVEIKRNDDLSWLWNESTALYPSIYLNTQQSPVAATLYVRNRVREAIRVSKIPDAKSPLPVFAYTRIVFTDQVLKFLSQDELVYTFGETVALGASGIVIWGSWENTRTKESCQAIKEYMDTTLNPYIINVTLAAKMCSQVLCQEQGVCIRKNWNSSDYLHLNPDNFAIQLEKGGKFTVRGKPTLEDLEQFSEKFYCSCYSTLSCKEKADVKDTDAVDVCIADGVCIDAF

SEQ ID NO: 250 - protein, 431 aa, artificial Sequence
  Hyaluronidase Variant
FRAPPVIPNVPFLWAWNAPSEFCLGKFDEPLDMSLFSFIGSPRINATGQGVTIFYVDRLGYYPYIDSITGVTVNGGIPQKISLQDHLDKAKKDITFYMPVDNLGMAVIDWEEWRPTWARNWKPKDVYKNRSIELVQQQNVQFSLTEATEKAKQEFEKAGKDFLVETIKLGKLLRPNHLWGYYLFPDCYNHHYKKPGYNGSCFNVEIKRNDDLSWLWNESTALYPSIYLNTQQSPVAATLYVRNRVREAIRVSKIPDAKSPLPVFAYTRIVFTDQVLKFLSQDELVYTFGETVALGASGIVIWGSWENTRTKESCQAIKEYMDTTLNPYIINVTLAAKMCSQVLCQEQGVCIRKNWNSSDYLHLNPDNFAIQLEKGGKFTVRGKPTLEDLEQFSEKFYCSCYSTLSCKEKADVKDTDAVDVCIADGVCIDAF

SEQ ID NO: 251 - protein, 431 aa, artificial Sequence
  Hyaluronidase Variant
FRAPPVIPNVPFLWAWNAPSEFCLGKFDEPLDMSLFSFIGSPRINATGQGVTIFYVDRLGYYPYIDSITGVTVNGGIPQKISLQDHLDKAKKDITFYMPVDNLGMAVIDWEEWRPTWARNWKPKDVYKNRSIELVQQQNVQLSLTEATEKAKQEFEKAGKDFLVETIKLGKLLRPNHLWGYYLFPDCYNHHYKKPGYNGSCFNVEIKRNDDLSWLWNESTALYPSIYLNTQQSPVAATLYVRNRVREAIRVSKIPDAKSPLPVFAYTRIVFTDQVLKFLSQDELVYTFGETVALGASGIVIWGSWEFTRTQESCQAIQEYMDTTLNPYIINVTLAAKMCSQVLCQEQGVCIRKNWNSSDYLHLNPDNFAIQLEKGGKFTVRGKPTLEDLEQFSEKFYCSCYSTLSCKEKADVKDTDAVDVCIADGVCIDAF

SEQ ID NO: 252 - protein, 431 aa, artificial Sequence
  Hyaluronidase Variant
FRAPPVIPNVPFLWAWNAPSEFCLGKFDEPLDMSLFSFIGSPRINATGQGVTIFYVDRLGYYPYIDSITGVTVNGGIPQKISLQDHLDKAKKDISFYMPVDNLGMAVIDWEEWRPTWARNWKPKDVYKNRSIELVQQQNVQLSATEATDKAKQEFEKAGKDFLVETIKLGKLLRPNHLWGYYLFPDCYNHHYKKPGYNGSCFNVEIKRNDDLSWLWNESTALYPSIYLNTNQSPVAATLYVRNRVREAIRVSKLPDAKSPLPVFAYTRIVFTDQALKFLSQDELVYTFGETVALGASGIVIWGSWENTRTKESCQAIKEYMDTTLNPYIINVTLAAKMCSQVLCQEQGVCIRKNWNSSDYLHLNPDNFAIQLEKGGKFTVRGKPTLEDLEQFSEKFYCSCYSTLSCKEKADVKDDDAVDVCIADGVCIDAF

SEQ ID NO: 253 - protein, 432 aa, artificial Sequence
  Hyaluronidase Variant
NFRAPPVIPNVPFLWAWNAPSEFCLGKFDEPLDMSLFSFIGSPRINATGQGVTIFYVDRLGYYPYIDSITGVTVNGGIPQKISLQDHLDKAKKDITFYMPVDNLGMAVIDWEEWRPTWARNWKPKDVYKNRSIELVQQQNVQLSLTEATEKAKQEFEKAGKDFLVETIKLGKLLRPNHLWGYYLFPDCYNHHYKKPGYNGSCFNVEIKRNDDLSWLWNESTALYPSIYLNTQQSPVAATLYVRNRVREAIRVSKIPDAKSPLPVFAYTRIVFTDQVLKFLSQDELVYTFGETVALGASGIVIWGSWENTRTKESCQAIKEYMDTTLNPYIINVTLAAKMCSQVLCQEQGVCIRKNWNSSDYLHLNPDNFAIQLEKGGKFTVRGKPTLEDLEQFSEKFYCSCYSTLSCKEKADVKDTDAVDVCIADGVCIDAF

SEQ ID NO: 254 - protein, 433 aa, artificial Sequence
  Hyaluronidase Variant
LNFRAPPVIPNVPFLWAWNAPSEFCLGKFDEPLDMSLFSFIGSPRINATGQGVTIFYVDRLGYYPYIDSITGVTVNGGIPQKISLQDHLDKAKKDITFYMPVDNLGMAVIDWEEWRPTWARNWKPKDVYKNRSIELVQQQNVQLSLTEATEKAKQEFEKAGKDFLVETIKLGKLLRPNHLWGYYLFPDCYNHHYKKPGYNGSCFNVEIKRNDDLSWLWNESTALYPSIYLNTQQSPVAATLYVRNRVREAIRVSKIPDAKSPLPVFAYTRIVFTDQVLKFLSQDELVYTFGETVALGASGIVIWGSWENTRTKESCQAIKEYMDTTLNPYIINVTLAAKMCSQVLCQEQGVCIRKNWNSSDYLHLNPDNFAIQLEKGGKFTVRGKPTLEDLEQFSEKFYCSCYSTLSCKEKADVKDTDAVDVCIADGVCIDAF

SEQ ID NO: 255 - protein, 431 aa, artificial Sequence
  Hyaluronidase Variant
FKAPPVIPNVPFLWAWNAPSEFCLGKFDEPLDMSLFSFIGSPRINATGQGVTIFYVDRLGYYPYIDSATGVTVNGGIPQKISLQDHLDKAKKDISFYMPVDNLGMAVIDWEEWRPTWARNWKPKDVYKNRSIELVQQQNVQLSMTEATDKAKQEFEKAGKDFLVETIKLGKLLRPNHLWGYYLFPDCYNHHYKKPGYNGSCFNVEIKRNDDLSWLWNESTALYPSIYLNTAQSPVAATLYVRNRVREAIRVSKLPDAKSPLPVFAYTRIVFTDQALKFLSQDELVYTFGETVALGASGIVIWGSWENTRTKESCQAIKEYMDTTLNPYIINVTLAAKMCSQVLCQEQGVCIRKNWNSSDYLHLNPDNFAIQLEKGGKFTVRGKPTLEDLEQFSEKFYCSCYSTLSCKEKADVKDDDAVDVCIADGVCIDAF

SEQ ID NO: 256 - protein, 431 aa, artificial Sequence
  Hyaluronidase Variant
FRAPPVIPNVPFLWAWNAPSEFCLGKFDEPLDMSLFSFIGSPRINATGQGVTIFYVDRLGYYPYIDSITGVTVNGGIPQKISLQDHLDKAKKDIAFYMPVDNLGMAVIDWEEWRPTWARNWKPKDVYKNRSIELVQQQNVQLSATEATAKAKQEFEKAGKDFLVETIKLGKLLRPNHLWGYYLFPDCYNHHYKKPGYNGSCFNVEIKRNDDLSWLWNESTALYPSIYLNTAQSPVAATLYVRNRVREAIRVSKLPDAKSPLPVFAYTRIVFTDQALKFLSQDELVYTFGETVALGASGIVIWGSWENTRTKESCQAIKEYMDTTLNPYIINVTLAAKMCSQVLCQEQGVCIRKNWNSSDYLHLNPDNFAIQLEKGGKFTVRGKPTLEDLEQFSEKFYCSCYSTLSCKEKADVKDDDAVDVCIADGVCIDAF

SEQ ID NO: 257 - protein, 431 aa, artificial Sequence
  Hyaluronidase Variant
FRAPPVIPNVPFLWAWNAPSEFCLGKFDEPLDMSLFSFIGSPRINATGQGVTIFYVDRLGYYPYIDSITGVTVNGGIPQKISLQDHLDKAKKDITFYMPVDNLGMAVIDWEEWRPTWARNWKPKDVYKNRSIELVQQQNVQLSLTEATEKAKQEFEKAGKDFLVETIKLGKLLRPNHLWGYYLFPDCYNHHYKKPGYNGSCFNVEIKRNDDLSWLWNESTALYPSIYLNTQQSPVAATLYVRNRVREAIRVSKIPDAKSPLPVFAYTRIVFTDQVLKFLSQDELVYTFGETVALGASGIVIWGSWEITRTMESCQAIKEYMDTTLNPYIINVTLAAKMCSQVLCQEQGVCIRKNWNSSDYLHLNPDNFAIQLEKGGKFTVRGKPTLEDLEQFSEKFYCSCYSTLSCKEKADVKDTDAVDVCIADGVCIDAF

SEQ ID NO: 258 - protein, 431 aa, artificial Sequence
  Hyaluronidase Variant
FRAPPVIPNVPFLWAWNAPSEFCLGKFDEPLDMSLFSFIGSPRINATGQGVTIFYVDRLGYYPYIDSITGVTVNGGIPQKISLQDHLDKAKKDITFYMPVDNLGMAVIDWEEWRPTWARNWKPKDVYKNRSIELVQQQNVQLSLTEATEKAKQEFEKAGKDFLVETIKLGKLLRPNHLWGYYLFPDCYNHHYKKPGYNGSCFNVEIKRNDDLSWLWNESTALYPSIYLNTQQSPVAATLYVRNRVREAIRVSKIPDAKSPLPVFAYTRIVFTDQVLKFLSQDELVYTFGETVALGASGIVIWGDLSISSTMESCQAIDEYMETILNPYIINVTLAAKMCSQVLCQEQGVCIRKNWNSSDYLHLNPDNFAIQLEKGGKFTVRGKPTLEDLEQFSEKFYCSCYSTLSCKEKADVKDTDAVDVCIADGVCIDAF

SEQ ID NO: 259 - protein, 431 aa, artificial Sequence
  Hyaluronidase Variant
FRAPPVIPNVPFLWAWNAPSEFCLGKFDEPLDMSLFSFIGSPRINATGQGVTIFYVDRLGYYPYIDSITGVTVNGGIPQKISLQDHLDKAKKDITFYMPVDNLGMAVIDWEEWRPTWARNWKPKDVYKNRSIELVQQQNVQLSLTEATEKAKQEFEKAGKDFLVETIKLGKLLRPNHLWGYYLFPDCYNHHYKKPGYNGSCFNVEIKRNDDLSWLWNESTALYPSIYLNTQQSPVAATLYVRNRVREAIRVSKIPDAKSPLPVFAYTRIVFTDQVLKFLSQDELVYTFGETVALGASGIVIWGDLSISRTMESCQAIDEYMETILNPYIINVTLAAKMCSQVLCQEQGVCIRKNWNSSDYLHLNPDNFAIQLEKGGKFTVRGKPTLEDLEQFSEKFYCSCYSTLSCKEKADVKDTDAVDVCIADGVCIDAF

SEQ ID NO: 260 - protein, 431 aa, artificial Sequence
  Hyaluronidase Variant
FRAPPVIPNVPFLWAWNAPSEFCLGKFDEPLDMSLFSFIGSPRINATGQGVTIFYVDRLGYYPYIDSITGVTVNGGIPQKISLQDHLDKAKKDISFYMPVDNLGMAVIDWEEWRPTWARNWKPKDVYKNRSIELVQQQNVQLSATEATDKAKQEFEKAGKDFLVETIKLGKLLRPNHLWGYYLFPDCYNHHYKKPGYNGSCFNVEIKRNDDLSWLWNESTALYPSIYLNTNQSPVAATLYVRNRVREAIRVSKLPDAKSPLPVFAYTRIVFTDQALKFLSQDELVYTFGETVALGASGIVIWGSWENTRTMESCQAIKEYMDTTLNPYIINVTLAAKMCSQVLCQEQGVCIRKNWNSSDYLHLNPDNFAIQLEKGGKFTVRGKPTLEDLEQFSEKFYCSCYSTLSCKEKADVKDDDAVDVCIADGVCIDAF

SEQ ID NO: 261 - protein, 431 aa, artificial Sequence
  Hyaluronidase Variant
FRAPPVIPNVPFLWAWNAPSEFCLGKFDEPLDMSLFSFIGSPRINATGQGVTIFYVDRLGYYPYIDSITGVTVNGGIPQKISLQDHLDKAKKDISFYMPVDNLGMAVIDWEEWRPTWARNWKPKDVYKNRSIELVQQQNVQLSATEATDKAKQEFEKAGKDFLVETIKLGKLLRPNHLWGYYLFPDCYNHHYKKPGYNGSCFNVEIKRNDDLSWLWNESTALYPSIYLNTNQSPVAATLYVRNRVREAIRVSKLPDAKSPLPVFAYTRIVFTDQALKFLSQDELVYTFGETVALGASGIVIWGSWEITRTMESCQAIKEYMDTTLNPYIINVTLAAKMCSQVLCQEQGVCIRKNWNSSDYLHLNPDNFAIQLEKGGKFTVRGKPTLEDLEQFSEKFYCSCYSTLSCKEKADVKDDDAVDVCIADGVCIDAF

SEQ ID NO: 262 - protein, 431 aa, artificial Sequence
  Hyaluronidase Variant
FRAPPVIPNVPFLWAWNAPSEFCLGKFDEPLDMSLFSFIGSPRINATGQGVTIFYVDRLGYYPYIDSITGVTVNGGIPQKISLQDHLDKAKKDIAFYMPVDNLGMAVIDWEEWRPTWARNWKPKDVYKNRSIELVQQQNVQLSATEATAKAKQEFEKAGKDFLVETIKLGKLLRPNHLWGYYLFPDCYNHHYKKPGYNGSCFNVEIKRNDDLSWLWNESTALYPSIYLNTAQSPVAATLYVRNRVREAIRVSKLPDAKSPLPVFAYTRIVFTDQALKFLSQDELVYTFGETVALGASGIVIWGDLSISSTMESCQAIDEYMETILNPYIINVTLAAKMCSQVLCQEQGVCIRKNWNSSDYLHLNPDNFAIQLEKGGKFTVRGKPTLEDLEQFSEKFYCSCYSTLSCKEKADVKDDDAVDVCIADGVCIDAF

SEQ ID NO: 263 - protein, 431 aa, artificial Sequence
  Hyaluronidase Variant
FRAPPVIPNVPFLWAWNAPSEFCLGKFDEPLDMSLFSFIGSPRINATGQGVTIFYVDRLGYYPYIDSITGVTVNGGIPQKISLQDHLDKAKKDIAFYMPVDNLGMAVIDWEEWRPTWARNWKPKDVYKNRSIELVQQQNVQLSATEATAKAKQEFEKAGKDFLVETIKLGKLLRPNHLWGYYLFPDCYNHHYKKPGYNGSCFNVEIKRNDDLSWLWNESTALYPSIYLNTAQSPVAATLYVRNRVREAIRVSKLPDAKSPLPVFAYTRIVFTDQALKFLSQDELVYTFGETVALGASGIVIWGDLSISRTMESCQAIDEYMETILNPYIINVTLAAKMCSQVLCQEQGVCIRKNWNSSDYLHLNPDNFAIQLEKGGKFTVRGKPTLEDLEQFSEKFYCSCYSTLSCKEKADVKDDDAVDVCIADGVCIDAF

SEQ ID NO: 264 - protein, 447 aa, Artificial Sequence
  Hyaluronidase Variant - PH20v
LNFRAPPVIPNVPFLWAWNAPSEFCLGKFDEPLDMSLFSFIGSPRINATGQGVTIFYVDRLGYYPYIDSITGVTVNGGIPQKISLQDHLDKAKKDITFYMPVDNLGMAVIDWEEWRPTWARNWKPKDVYKNRSIELVQQQNVQLSLTEATEKAKQEFEKAGKDFLVETIKLGKLLRPNHLWGYYLFPDCYNHHYKKPGYNGSCPNVEIKRNDDLSWLWNESTALYPSIYLNTQQSPVAATLYVRNRVREAIRVSKIPDAKSPLPVFAYTRIVFTDQVLKFLSQDELVYTFGETVALGASGIVIWGTLSIMRSMKSCLLLDNYMETILNPYIINVTLAAKMCSQVLCQEQGVCIRKNWNSSDYLHLNPDNFAIQLEKGGKFTVRGKPTLEDLEQFSEKFYCSCYSTLSCKEKADVKDTDAVDVCIADGVCIDAFLKPPMETEEPQIFY

1. A method of treating a subject in need thereof, comprising subcutaneously administering to the subject a dose of a pharmaceutical composition comprising (i) an antibody that specifically binds PD-1 or PD-L1 and inhibits the interaction of PD-1 and PD-L1 (“an anti-PD-1 antibody” or “an anti-PD-L1 antibody”, respectively) and (ii) an endoglycosidase hydrolase enzyme; wherein the dose comprises one or more subcutaneous unit doses; and wherein the dose comprises at least about 300 mg to at least about 2400 mg of the anti-PD-1 antibody or the anti-PD-L1 antibody.

2. The method of claim 1, wherein;
(i) the dose comprises two or more subcutaneous unit doses, and wherein the two or more subcutaneous unit doses are administered concurrently or subsequently;
(ii) the dose is administered about every one, two, three, four, six, or eight week: or
(iii) both (i) and (ii).

3-5. (canceled)

6. The method of claim 1, wherein;
(i) the dose of the anti-PD-1 antibody or the anti-PD-L1 antibody is about 250 mg to about 600 mg administered about every week,
(ii) the dose of the anti-PD-1 antibody or the anti-PD-L1 antibody is about 300 mg to about 900 mg administered about every two weeks,
(iii) the dose of the anti-PD-1 antibody or the anti-PD-L1 antibody is about 900 mg to about 1500 mg administered about every four weeks, or
(iv) the dose of the anti-PD-L1 antibody is about 900 mg to about 1800 mg administered about every two weeks and
wherein the dose of the endoglycosidase hydrolase enzyme is at least about 1.000 units to at least about 30.000 units.

7. (canceled)

8. The method of claim 1, wherein;
i. the dose of the anti-PD-1 antibody or the anti-PD-L1 antibody is about 300 mg administered about every week;
ii. the dose of the anti-PD-1 antibody or the anti-PD-L1 antibody is about 600 mg administered about every two weeks;
iii. the dose of the antibody or the anti-PD-L1 antibody is about 1200 mg administered about every four weeks: or
iv. the dose of the anti-PD-L1 antibody is about 1200 mg administered every two weeks.

9. (canceled)

10. The method of claim 8, wherein the dose of the antibody comprises:
(i) a single subcutaneous unit dose of about 300 mg in a total administered volume of about 2 mL;
(ii) a single subcutaneous unit dose of about 1200 mg in a total administered volume of greater than about 5 mL;
(ii) two subcutaneous unit doses, wherein each of the two subcutaneous unit doses comprises about 300 mg of the antibody, and wherein at least one of the two subcutaneous unit doses comprises about 300 mg of the antibody in a total volume of greater than about 2 mL;
(iii) four subcutaneous unit doses, wherein each of the four subcutaneous unit doses comprises about 300 mg of the antibody, and wherein at least one of the four subcutaneous unit doses comprises about 300 mg of the antibody in a total volume of greater than 2 mL.

11-39. (canceled)

40. The method of claim 1, wherein the anti-PD-1 antibody or anti-PD-L1 antibody and the endoglycosidase hydrolase enzyme are administered at a dose of:
i. about 300 mg of the antibody and about 4000 units of the endoglycosidase hydrolase enzyme, once about every week;
ii. about 600 mg of the antibody and about 8000 units of the endoglycosidase hydrolase enzyme, once about every two weeks: or
iii. about 1200 mg of the antibody and about 16.000 units of the endoglycosidase hydrolase enzyme, once about every four weeks.

41-50. (canceled)

51. The method of claim 1, wherein the endoglycosidase hydrolase enzyme cleaves hyaluronic acid at a hexosaminidic β (1-4) or (1-3) linkage.

52. The method of claim 1, wherein the endoglycosidase hydrolase enzyme comprises;
(i) a catalytic domain of hyaluronidase PH-20 (HuPH20), HYAL1, HYAL2, HYAL3, HYAL4, or HYALPS1;
(iii) an amino acid sequence having at least about 70% sequence identity to amino acids 36-490 of SEO ID NO: 1; or
(iii) both (i) and (ii)

53-54. (canceled)

55. The method of claim 1, wherein the endoglycosidase hydrolase enzyme comprises a hyaluronidase selected from:
(i) HuPH20, HYAL1, HYAL2, HYAL3, HYAL4, any variant, r any isoform thereof;
(iii) a modified hyaluronidase comprising one or more amino acid substitutions relative to a wild-type hyaluronidase selected from the group consisting of HuPH20, HYAL1, HYAL2, HYAL3, HYAL4, HYALPS1, or a fragment thereof
(iii) rHuPH20 or a fragment thereof;
(iv) a modified rHuPH20, wherein the modified rHuPH20 comprises:
a. one or more amino acid substitution in an alpha-helix region, a linker region, or both an alpha-helix region and a linker region relative to wild-type rHuPH20;
b. deletion of one or more N-terminal amino acid, one or more C-terminal amino acid, or one or more N-terminal amino acid and one or more C-terminal amino acid relative to wild-type rHuPH20; or
c. both (i) and (ii); and
(v) any combination of (i) to (iv).

56-61. (canceled)

62. The method of claim 1, wherein;
(i) the anti-PD-1 antibody comprises an antibody selected from nivolumab, pembrolizumab, PDR001, MEDI-0680, cemiplimab, toripalimab, tislelizumab, INCSHR1210, TSR-042, GLS-010, AM-0001, STI-1110, AGEN2034, MGA012, BCD-100, IBI308, and any combination thereof; or
(ii) the anti-PD-L1 antibody comprises an antibody selected from BMS-936559, atezolizumab, durvalumab, avelumab, STI-1014, CX-072, KN035, LY3300054, BGB-A333, CK-301, and any combination thereof.

63-67. (canceled)

68. The method of claim 67, wherein the subject is afflicted with a cancer selected from squamous cell carcinoma, small-cell lung cancer (SCLC), non-small cell lung cancer (NSCLC), squamous NSCLC, nonsquamous NSCLC, glioma, gastrointestinal cancer, renal cancer, clear cell carcinoma, ovarian cancer, liver cancer, colorectal cancer, endometrial cancer, kidney cancer, renal cell carcinoma (RCC), prostate cancer, hormone refractory prostate adenocarcinoma, thyroid cancer, neuroblastoma, pancreatic cancer, glioblastoma, glioblastoma multiforme, cervical cancer, stomach cancer, bladder cancer, hepatoma, breast cancer, colon carcinoma, head and neck cancer, gastric cancer, germ cell tumor, pediatric sarcoma, sinonasal natural killer, melanoma, bone cancer, skin cancer, uterine cancer, cancer of the anal region, testicular cancer, carcinoma of the fallopian tubes, carcinoma of the endometrium, carcinoma of the cervix, carcinoma of the vagina, carcinoma of the vulva, cancer of the esophagus, cancer of the small intestine, cancer of the endocrine system, cancer of the parathyroid gland, cancer of the adrenal gland, sarcoma of soft tissue, cancer of the urethra, cancer of the penis, rectal cancer, solid tumors of childhood, cancer of the ureter, carcinoma of the renal pelvis, neoplasm of the central nervous system (CNS), primary CNS lymphoma, tumor angiogenesis, spinal axis tumor, brain cancer, brain stem glioma, pituitary adenoma, Kaposi's sarcoma, epidermoid cancer, squamous cell cancer, environmentally-induced cancers including those induced by asbestos, virus-related cancers or cancers of viral origin (e.g., human papilloma virus (HPV-related or -originating tumors)), and any combination thereof.

69. The method of claim 1, wherein the pharmaceutical composition is administered:
(i) using an auto-injector or a wearable pump;
(ii) by subcutaneous infusion for less than about 10 minutes;
(iii) both (i) and (ii).

70-72. (canceled)

73. The method of claim 1, wherein the pharmaceutical composition further comprises:
(i) at least two antioxidants selected from methionine, tryptophan, histidine, cysteine, ascorbic acid, glycine, DTPA, and EDTA;
(ii) a tonicity modifier and/or stabilizer selected from a sugar, an amino acid, a polyol, a salt, or a combination thereof;
(iii) a buffering agent selected from histidine, succinate, tromethamine, sodium phosphate, sodium acetate, and sodium citrate;
(iv) a surfactant selected from the group consisting of polysorbate 20, polysorbate 80, and poloxamer 188: or
(v) any combination of (i) to (iv).

74-75. (canceled)

76. The method of claim 73, wherein the pharmaceutical composition comprises:
(i) at least about 1 to about 20 mM methionine;
(iii) at least about 10 μM to about 200 μM DTPA;
(iii) at least about 10 mM to at least about 500 mM sucrose;
(iv) at least about 5 mM to at least about 100 mM histidine;
(v) at least about 0.01% w/v to at least about 0.1% w/v polysorbate 80; or
(vi) any combination of (i) to (v).

77. (canceled)

78. The method of claim 73, wherein the pharmaceutical composition comprises:
(i) about 5 mM methionine;
(ii) about 50 μM DTPA;
(iii) about 250 mM sucrose;
(iv) about 20 mM histidine;
(v) about 0.05% w/v polysorbate 80: or
(vi) any combination of (i) to (v).

79-100. (canceled)

101. The method of claim 1, wherein the pharmaceutical composition comprises:
(i) (a) about 120 mg/mL of the anti-PD-1 antibody,
(b) about 20 mM L-histidine,
(c) about 250 mM sucrose,
(d) about 0.05% w/v polysorbate 80,
(e) about 50 μM pentetic acid,
(f) about 5 mM methionine, and
(g) about 0.0182 mg/mL rHuPH20;
(ii) (a) about 120 mg/mL of the anti-PD-1 antibody,
(b) about 20 mM L-histidine,
(c) about 250 mM sucrose,
(d) about 0.05% w/v polysorbate 80,
(e) about 50 μM pentetic acid,
(f) about 5 mM methionine, and
(g) about 2000 U/mL rHuPH20;
(iii) (a) about 150 mg/mL of the anti-PD-1 antibody,
(b) about 20 mM L-histidine,
(c) about 250 mM sucrose,
(d) about 0.05% w/v polysorbate 80,
(e) about 50 uM pentetic acid,
(f) about 5 mM methionine, and
(g) about 0.0182 mg/mL rHuPH20; or
(i) (a) about 150 mg/mL of the anti-PD-1 antibody,
(b) about 20 mM L-histidine,
(c) about 250 mM sucrose,
(d) about 0.05% w/v polysorbate 80,
(e) about 50 μM pentetic acid,
(f) about 5 mM methionine, and
(g) about 2000 U/mL rHuPH20.

102-104. (canceled)

105. The method of claim 101, wherein the pharmaceutical composition comprises a pH of about 5.2 to about 6.8.

106-163. (canceled)

164. The pharmaceutical composition of claim 1, further comprising a second therapeutic agent wherein the second therapeutic agent is a checkpoint inhibitor selected from the group consisting of an anti-CTLA-4 antibody, an anti-LAG-3 antibody, an anti-TIM3 antibody, an anti-TIGIT antibody, an anti-TIM3 antibody, an anti-NKG2a antibody, an anti-OX40 antibody, an anti-ICOS antibody, an anti-MICA antibody, an anti-CD137 antibody, an anti-KIR antibody, an anti-TGF antibody, an anti-IL-10 antibody, an anti-IL-8 antibody, an anti-B7-H4 antibody, an anti-Fas ligand antibody, an anti-CXCR4 antibody, an anti-mesothelin antibody, an anti-CD27 antibody, an anti-GITR, or any combination thereof.

165-168. (canceled)

169. A unit dose comprising:
(i) (a) about 120 mg/mL of the anti-PD-1 antibody;
(b) about 20 mM L-histidine
(c) about 250 mM sucrose
(d) about 0.05% w/v polysorbate 80
(e) about 50 μM pentetic acid
(f) about 5 mM methionine and
(g) about 2000 U/mL rHuPH20; or
(ii) (a) about 150 mg/mL of the anti-PD-1 or anti-PD-L1 antibody,
(b) about 20 mM L-histidine,
(c) about 250 mM sucrose,
(d) about 0.05% w/v polysorbate 80,
(e) about 50 μM pentetic acid,
(f) about 5 mM methionine, and
(g) about 2000 U/mL rHuPH20.

170. (canceled)

171. A vial, an autoinjector, or a wearable pump comprising claim 169.

172-175. (canceled)
